(19) United States
(12) Patent Application Publication
(10) Pub. No.: US 2013/0045324 A1
(43) Pub. Date: Feb. 21, 2013

(54) METHODS OF INCREASING PROTEIN, OIL, AND/OR AMINO ACID CONTENT IN A PLANT

(71) Applicants: Hanping Guan, Chapel Hill, NC (US); Heiko Härtel, Berlin (DE); Suzy M. Cocciolone, Garner, NC (US)

(72) Inventors: Hanping Guan, Chapel Hill, NC (US); Heiko Härtel, Berlin (DE); Suzy M. Cocciolone, Garner, NC (US)

(73) Assignee: BASF Plant Science Company GmbH, Ludwigshafen (DE)

(21) Appl. No.: 13/587,074

(22) Filed: Aug. 16, 2012

Related U.S. Application Data
(60) Provisional application No. 61/525,238, filed on Aug. 19, 2011.

(51) Int. Cl. A01H 5/00; C12N 5/10; A01H 5/10; A23L 1/10; A23L 1/212; A23K 1/00; A23L 1/307; A23K 1/18; C12N 15/82; A01H 1/02

(52) U.S. Cl. 426/623; 435/320.1; 435/419; 800/298; 435/412; 800/320.1; 435/468; 800/281; 800/278; 800/275; 800/264; 800/260; 426/615; 426/635; 426/665

(57) ABSTRACT

This invention relates generally to methods for preparing plants, plant cells, or plant parts with increased content in one or more of protein, oil, or one or more amino acids. The invention also relates to transgenic plants comprising multiple genes of interest including a nucleic acid molecule encoding a polypeptide having pyruvate kinase activity and a nucleic acid molecule encoding a trehalose-6-phosphate synthase (TPS) homolog. Expression cassettes for achieving such gene expression manipulation, as well as recombinant constructs, vectors and plants, plant cells, or plant parts comprising the same, are also provided. Plants, plant cells, or plant parts with increased content in one or more of protein, oil, or one or more amino acids thus obtained may be useful in preparing foodstuffs and animal feeds and in plant breeding programs for developing further hybrid or inbred lines.

### CROSS REFERENCE TO RELATED APPLICATIONS

[0001] This application claims the priority benefit of U.S. Provisional Application Ser. No. 61/525,238 filed Aug. 19, 2011.

### SUBMISSION OF SEQUENCE LISTING

[0002] The Sequence Listing associated with this application is filed in electronic format via EFS-Web and hereby incorporated by reference into the specification in its entirety. The name of the text file containing the Sequence Listing is Sequence_Listing_{—}17731_{—}00041_US. The size of the text file is 664 KB, and the text file was created on Jul. 13, 2012.

### FIELD OF THE INVENTION

[0003] This invention relates generally to methods for preparing a plant, plant cell, or plant part with increased content in one or more of protein, oil, or one or more amino acids relative to a corresponding wild-type plant, plant cell, or plant part by manipulating the expression level of a nucleic acid molecule encoding a polypeptide having pyruvate kinase activity and a nucleic acid molecule encoding a trehalose-6-phosphate synthase (TPS) homolog in a plant, plant cell, or plant part. Expression cassettes for achieving such gene expression manipulation, as well as recombinant constructs, vectors and plants, plant cells, or plant parts comprising the same, are also provided. Plants, plant cells, or plant parts with increased content in one or more of protein, oil, or one or more amino acids thus obtained may be useful in the preparation of foodstuffs and animal feeds. Plants, plant cells, or plant parts with increased content in one or more of protein, oil, or one or more amino acids thus obtained may also be useful in plant breeding programs for developing further hybrid or inbred lines.

### BACKGROUND OF THE INVENTION

[0004] Crops such as rice, corn, soybean, sorghum, wheat, oats, rye, and barley are a major source of animal feed for many types of livestock and supply most of their dietary needs. These crops are also a primary source for human food and other industrial purposes. Corn tends to be the preferred feed grain because of its highly digestible carbohydrate content and relatively low fiber content, which is particularly important for swine and poultry (Hard, Proc. Southwest Nutr. Conf., 2005, 43-54). As a result, corn is the most widely produced feed grain globally, accounting for more than 90% of the grain used in feed. However, corn, as well as other crops commonly used as feed grain, have nutritional limitations such as protein and/or oil content, amino acid composition, minerals and vitamins for several types of livestock, especially swine, poultry, and cattle.

[0005] Because of the suboptimal protein and/or oil content and amino acid composition of plants, in comparison to the nutritional requirement of the animal, it is common practice to use feed additives and supplements, such as protein-rich feeds, amino acids, vitamins, minerals and fats in animal diets. The nutritional limitations of feed grain have become more critical as the demand for higher feeding efficiency has increased. The ratio of cereals to supplements in animal feed has changed through the years in an attempt to maximize feeding efficiency and minimize feeding costs. Major factors contributing to feed efficiency are the genetic potential of the animal and by the nutrients supplied to the animal. As the feed efficiency has improved due to genetic enhancements, the mineral and nutrient requirements for feed necessary to assure a complete and healthy diet have also risen. Since an animal's feed intake limits the amount of nutrients and calories it can consume, the feed industry has had to develop ways to make feeds that have improved protein quality, improved balance of essential amino acids, and metabolizable energy (oil).

[0006] Sources of feed protein, especially animal-derived protein, have come under global public scrutiny because of the bovine spongiform encephalopathy, or mad cow disease, crisis associated with the feeding of meat and bone meal as the primary protein source in animal diets in many parts of the world. Plant protein sources have become a dominant alternative protein supplement used in feed following bans on using meat and bone meal.

[0007] Plant protein sources, however, may lack sufficient levels of essential nutrients required for adequate animal health, growth and performance. Requirements vary depending on the species and age of the animal. For example, the order of the top three limiting amino acids in feed composed of corn and soybean meal is lysine, threonine, and tryptophan for swine, and methionine, lysine, and threonine for poultry. (FAO Animal Production and Health Proceedings, Protein Sources for the Animal Feed Industry, xi-xxv, 161-183 (2004)). These limiting amino acids must be available at specific minimum levels for the animals to use dietary protein efficiently. (Johnson et al. “Identification of Valuable Corn Quality Traits for Livestock Feed”, Report from the Center for Crops Utilization Research, Iowa State University, 1-22 (1999)). Furthermore, crude protein in feed ingredients is not totally digestible for any species. For example, corn protein is approximately 84% digestible by poultry and 82% digestible by swine (Johnson et al. (1999)). One method of increasing the nutritional quality of feed is to decrease crude protein in feed and supplement the feed with amino acids.

[0008] In addition to improving protein and amino acid composition, the feed industry has also had to develop ways to make feeds that are more calorie dense such as by adding fat to the feed, often in the form of a liquid such as oil. Fat has the advantage of supplying calories to each mouthful of feed. However, adding fat to feed has disadvantages such as increased cost, added labor, and technical difficulties associated with automatic feeding systems. Additionally, the fat is often of poor quality, thus reducing the overall quality of the feed. To reduce the use of liquid fat in feed, the industry has tried increasing the oil content of the grain used in feed. This extra oil in the grain reduces and may eliminate the need for the addition of liquid fat to the feed.

[0009] Each of the various ingredients necessary to produce the right combination of nutrients (i.e. protein, amino acids, enzymes, etc.) will need to be transported from site of production and/or processing to the site of the end-user. The availability, price, and transportation requirements and costs of each component of a particular feed will vary from year to year and in different geographical regions. Because of the variability of the supply and cost of nutrients and additives, livestock feeders and feed manufacturers would value plants with traits that decrease the need for more expensive feedstuffs and additives and can deliver increased nutrients in the same volume of grain.

[0010] Because feed is around 60% of animal production costs, any savings in feed costs can be considerable, especially in large operations. For example, nutritionally enhanced corn which can deliver higher levels of important nutrients and metabolizable energy, and/or enhanced digestibility and bioavailability of nutrients would provide the following benefits: reduced feed costs per unit weight gain or production of eggs or milk; reduced animal waste, particularly nitrogen and phosphorous; reduced veterinary costs and improved disease resistance; improved processing characteristics to make the feed; and improved quality (Johnson, et al. (1999)). Cost savings can be achieved by using nutritionally enhanced plants such as corn through, for example, reduced cost for needed supplements and synthetic additives, reduced transportation costs associated with the shipping of each additive and ingredients to produce the additives, reduced cost in mixing numerous additives during feed processing, and reduced costs associated with disposal of excess volume of manure.

[0011] Much effort has been instituted academically and industry-wide to improve the nutritional composition of feed grain. Both traditional plant breeding and biotechnology techniques have been used to develop plants with desirable traits. For example, U.S. Pat. No. 5,723,730 describes an inbred corn line used to produce a hybrid with elevated percent oil and protein in grain. U.S. Pat. No. 6,268,550 suggests that an increase in acetyl CoA carboxylase (ACCase) activity during the early to mid stages of soybean plant development leads to an increase in oil content. Zeh (Plant Physiol., 2001, 127: 792-802) describes increasing the methionine content in potato plants by inhibiting threonine synthase using antisense technology. U.S. Pat. No. 5,589,616 discloses producing higher amounts of amino acids in plants by overexpressing a monocot storage protein. Similar approaches have been used in U.S. Pat. No. 4,886,878, U.S. Pat. No. 5,082,993 and U.S. Pat. No. 5,670,635. Other methods for increasing amino acids are disclosed in WO 95/15392, WO 96/38574, WO 89/11789, and WO 93/19190. In these cases, specific enzymes in the amino acid biosynthetic pathway such as the dihydrodipicolinic acid synthase are deregulated leading to an increase in the production of lysine.

[0012] Examples of grain-based feed that provide improved animal nutrition and can reduce environmental impact of animal production are described by Chang et al. in U.S. Pat. Nos. 7,087,261 and 6,774,288 and in U.S. Publ. No. 2005/0246791.

[0013] Improved nutritional composition of feed grain may be achieved in transgenic plants through introduction of a single transgene or multiple transgenes. Introduction of multiple transgenes, or “stacking”, is described by Dafny-Yelin et al. (Plant Physiol., 2007, 145: 1118-1128) and Douglas et al. (“Gene Stacking”, in Molecular Techniques in Crop Improvement, Second Edition, Chapter 26, pp. 613-629 (2010)) and in U.S. Publ. No. 2010/0132072 and U.S. Pat. No. 6,455,315.

[0014] Methods for producing plants having desirable high value traits are complex and involve particular difficulties or conditions. For example, high value traits are often associated with reduced plant vigor, yield, or seed viability.

[0015] There remains a need to develop plants with increased content in one or more of protein, oil, and/or one or more amino acids to reduce feed costs to supply improved quality food for both animals and humans. Crop plants, such as corn plants, having these desirable traits may be used as starting material for further breeding to develop additional inbred lines and hybrids with these traits.

### SUMMARY OF THE INVENTION

[0016] The present invention provides novel expression cassettes and methods for increasing content in one or more of protein, oil, or one or more amino acids in a plant, plant cell, or plant part. Recombinant constructs, vectors, and plant cells, plants or parts thereof, comprising the expression cassettes of the invention as well as methods for their production are also provided.

[0017] In one embodiment, transgenic plants, plant cells, or plant parts comprising a nucleic acid molecule encoding a polypeptide having pyruvate kinase activity and a nucleic acid molecule encoding a trehalose-6-phosphate synthase (TPS) homolog are provided.

[0018] In one aspect, the invention provides a recombinant construct comprising:

[0019] (a) a first expression cassette comprising a first promoter that is functional in a plant and is heterologous and operably linked to a first nucleic acid molecule; and

[0020] (b) a second expression cassette comprising a second promoter that is functional in a plant and is heterologous and operably linked to a second nucleic acid molecule,

[0021] wherein the first nucleic acid molecule comprises:

[0022] (i) the nucleotide sequence of SEQ ID NO: 120, 122, 123, 125, 145, 147, 149, 151, 153, 155, 157, 159, 161, 163 or 165;

[0023] (ii) a nucleotide sequence encoding the amino acid sequence of SEQ ID NO: 121, 124, 146, 148, 150, 152, 154, 156, 158, 160, 162, 164 or 166;

[0024] (iii) a nucleotide sequence having at least 70% identity to the nucleotide sequence of SEQ ID NO: 120, 122, 123, 125, 145, 147, 149, 151, 153, 155, 157, 159, 161, 163 or 165 and encoding a polypeptide having a Pfam:PF00982.15 glycosyltransferase family 20 domain and a Pfam:PF02358.10 trehalose-phosphatase domain;

[0025] (iv) a nucleotide sequence encoding an amino acid sequence having at least 80% identity to the amino acid sequence of SEQ ID NO: 121, 124, 146, 148, 150, 152, 154, 156, 158, 160, 162, 164 or 166 and having a Pfam:PF00982.15 glycosyltransferase family 20 domain and a Pfam:PF02358.10 trehalose-phosphatase domain;

[0026] (v) a nucleotide sequence encoding an amino acid sequence comprising a Pfam:PF00982.15 glycosyltransferase family 20 domain and a Pfam:PF02358.10 trehalose-phosphatase domain, wherein the Pfam:PF00982.15 glycosyltransferase family 20 domain has at least 50% identity to the amino acid residues 57 to 541 of SEQ ID NO: 121 or the amino acid residues 59 to 546 of SEQ ID NO: 124, and wherein the Pfam:PF02358.10 trehalose-phosphatase domain has at least 55% identity to the amino acid residues 590 to 825 of SEQ ID NO: 121 or the amino acid residues 595 to 830 of SEQ ID NO: 124;

[0027] (vi) a nucleotide sequence encoding an amino acid sequence comprising the amino acid sequences of SEQ ID NO: 126, 127, 128, 129, 130, 131, 132, 133, 134, 135, 136 and 137,

[0028] and wherein the second nucleic acid molecule comprises:

[0029] (i) the nucleotide sequence of SEQ ID NO: 1, 3, 5, 7, 9, 11, 13, 87 or 89;

[0030] (ii) a nucleotide sequence encoding the amino acid sequence of SEQ ID NO: 2, 4, 6, 8, 10, 12, 14, 88, or 90;

[0031] (iii) a nucleotide sequence having at least 60% identity to the nucleotide sequence of SEQ ID NO: 1, 3, 5, 7, 9, 11, 13, 87 or 89 and encoding a polypeptide having a Pfam:PF00224 pyruvate kinase barrel domain and a Pfam:PF02887 pyruvate kinase alpha/beta domain;

[0032] (iv) a nucleotide sequence encoding an amino acid sequence having at least 60% identity to the amino acid sequence of SEQ ID NO: 2, 4, 6, 8, 10, 12, 14, 88 or 90 and having a Pfam:PF00224 pyruvate kinase barrel domain and a Pfam:PF02887 pyruvate kinase alpha/beta domain;

[0033] (v) a nucleotide sequence encoding an amino acid sequence comprising a Pfam:PF00224 pyruvate kinase barrel domain and a Pfam:PF02887 pyruvate kinase alpha/beta domain, wherein the Pfam:PF00224 pyruvate kinase barrel domain has at least 80% identity to the amino acid residues 109 to 449 of SEQ ID NO: 2, the amino acid residues 98 to 439 of SEQ ID NO: 10, or the amino acid residues 5 to 350 of SEQ ID NO: 88, and wherein the Pfam:PF02887 pyruvate kinase alpha/beta domain has at least 80% identity to the amino acid residues 462 to 578 of SEQ ID NO: 2, the amino acid residues 452 to 566 of SEQ ID NO: 10, or the amino acid residues 362 to 478 of SEQ ID NO: 88; or

[0034] (vi) a nucleotide sequence encoding an amino acid sequence having at least 60% identity to the amino acid sequence of SEQ ID NO: 2, 4, 6, 8, 10, 12, 14, 88 or 90, wherein said amino acid sequence further comprises the amino acid sequences of SEQ ID NO: 258 and 259.

[0035] In a specific embodiment, the invention provides a plant, plant cell, or plant part, comprising:

[0036] (a) a first expression cassette comprising a first promoter that is functional in a plant and is heterologous and operably linked to a first nucleic acid molecule; and

[0037] (b) a second expression cassette comprising a second promoter that is functional in a plant and is heterologous and operably linked to a second nucleic acid molecule,

[0038] wherein the first nucleic acid molecule comprises:

[0039] (i) the nucleotide sequence of SEQ ID NO: 120, 122, 123, 125, 145, 147, 149, 151, 153, 155, 157, 159, 161, 163 or 165;

[0040] (ii) a nucleotide sequence encoding the amino acid sequence of SEQ ID NO: 121, 124, 146, 148, 150, 152, 154, 156, 158, 160, 162, 164 or 166;

[0041] (iii) a nucleotide sequence having at least 70% identity to the nucleotide sequence of SEQ ID NO: 120, 122, 123, 125, 145, 147, 149, 151, 153, 155, 157, 159, 161, 163 or 165 and encoding a polypeptide having a Pfam:PF00982.15 glycosyltransferase family 20 domain and a Pfam:PF02358.10 trehalose-phosphatase domain;

[0042] (iv) a nucleotide sequence encoding an amino acid sequence having at least 80% identity to the amino acid sequence of SEQ ID NO: 121, 124, 146, 148, 150, 152, 154, 156, 158, 160, 162, 164 or 166 and having a Pfam:PF00982.15 glycosyltransferase family 20 domain and a Pfam:PF02358.10 trehalose-phosphatase domain;

[0043] (v) a nucleotide sequence encoding an amino acid sequence comprising a Pfam:PF00982.15 glycosyltransferase family 20 domain and a Pfam:PF02358.10 trehalose-phosphatase domain, wherein the Pfam:PF00982.15 glycosyltransferase family 20 domain has at least 50% identity to the amino acid residues 57 to 541 of SEQ ID NO: 121 or the amino acid residues 59 to 546 of SEQ ID NO: 124, and wherein the Pfam:PF02358.10 trehalose-phosphatase domain has at least 55% identity to the amino acid residues 590 to 825 of SEQ ID NO: 121 or the amino acid residues 595 to 830 of SEQ ID NO: 124;

[0044] (vi) a nucleotide sequence encoding an amino acid sequence comprising the amino acid sequences of SEQ ID NO: 126, 127, 128, 129, 130, 131, 132, 133, 134, 135, 136 and 137,

[0045] and wherein the second nucleic acid molecule comprises:

[0046] (i) the nucleotide sequence of SEQ ID NO: 1, 3, 5, 7, 9, 11, 13, 87 or 89;

[0047] (ii) a nucleotide sequence encoding the amino acid sequence of SEQ ID NO: 2, 4, 6, 8, 10, 12, 14, 88, or 90;

[0048] (iii) a nucleotide sequence having at least 60% identity to the nucleotide sequence of SEQ ID NO: 1, 3, 5, 7, 9, 11, 13, 87 or 89 and encoding a polypeptide having a Pfam:PF00224 pyruvate kinase barrel domain and a Pfam:PF02887 pyruvate kinase alpha/beta domain;

[0049] (iv) a nucleotide sequence encoding an amino acid sequence having at least 60% identity to the amino acid sequence of SEQ ID NO: 2, 4, 6, 8, 10, 12, 14, 88 or 90 and having a Pfam:PF00224 pyruvate kinase barrel domain and a Pfam:PF02887 pyruvate kinase alpha/beta domain;

[0050] (v) a nucleotide sequence encoding an amino acid sequence comprising a Pfam:PF00224 pyruvate kinase barrel domain and a Pfam:PF02887 pyruvate kinase alpha/beta domain, wherein the Pfam:PF00224 pyruvate kinase barrel domain has at least 80% identity to the amino acid residues 109 to 449 of SEQ ID NO: 2, the amino acid residues 98 to 439 of SEQ ID NO: 10, or the amino acid residues 5 to 350 of SEQ ID NO: 88, and wherein the Pfam:PF02887 pyruvate kinase alpha/beta domain has at least 80% identity to the amino acid residues 462 to 578 of SEQ ID NO: 2, the amino acid residues 452 to 566 of SEQ ID NO: 10, or the amino acid residues 362 to 478 of SEQ ID NO: 88; or

[0051] (vi) a nucleotide sequence encoding an amino acid sequence having at least 60% identity to the amino acid sequence of SEQ ID NO: 2, 4, 6, 8, 10, 12, 14, 88 or 90, wherein said amino acid sequence further comprises the amino acid sequences of SEQ ID NO: 258 and 259.

[0052] In some embodiments, the first promoter and/or the second promoter of the recombinant construct or expression cassettes is a constitutive promoter, a seed-specific or seed-preferential promoter, an endosperm-specific or endosperm-preferential promoter, or an embryo-specific or embryo-preferential promoter.

[0053] In embodiments where the promoter is a constitutive promoter, the promoter may comprise:

[0054] (a) the nucleotide sequence of SEQ ID NO: 109 or 110;

[0055] (b) a nucleotide sequence having at least 95% identity to the nucleotide sequence of SEQ ID NO: 109 or 110, wherein said nucleotide sequence has constitutive expression activity; or

[0056] (c) a fragment of the nucleotide sequence of SEQ ID NO: 109 or 110, wherein the fragment has constitutive expression activity.

[0057] In embodiments where the promoter is a seed-specific or seed-preferential promoter, the promoter may comprise:

[0058] (a) the nucleotide sequence of SEQ ID NO: 104, 105, 140, 143 or 144;

[0059] (b) a nucleotide sequence having at least 95% identity to the nucleotide sequence of SEQ ID NO: 104, 105, 140, 143 or 144, wherein said nucleotide sequence has seed-specific or seed-preferential expression activity; or

[0060] (c) a fragment of the nucleotide sequence of SEQ ID NO: 104, 105, 140, 143 or 144, wherein the fragment has seed-specific or seed-preferential expression activity.

[0061] In embodiments where the promoter is an endosperm-specific or endosperm-preferential promoter, the promoter may comprise:

[0062] (a) the nucleotide sequence of SEQ ID NO: 106 or 107;

[0063] (b) a nucleotide sequence having at least 95% identity to the nucleotide sequence of SEQ ID NO: 106 or 107, wherein said nucleotide sequence has endosperm-specific or endosperm-preferential expression activity; or

[0064] (c) a fragment of the nucleotide sequence of SEQ ID NO: 106 or 107, wherein the fragment has endosperm-specific or endosperm-preferential expression activity.

[0065] In yet other embodiments where the promoter is an embryo-specific or embryo-preferential promoter, the promoter may comprise:

[0066] (a) the nucleotide sequence of SEQ ID NO: 108, 141 or 142;

[0067] (b) a nucleotide sequence having at least 95% identity to the nucleotide sequence of SEQ ID NO: 108, 141 or 142, wherein said nucleotide sequence has embryo-specific or embryo-preferential expression activity; or

[0068] (c) a fragment of the nucleotide sequence of SEQ ID NO: 108, 141 or 142, wherein the fragment has embryo-specific or embryo-preferential expression activity.

[0069] In some specific embodiments, the first expression cassette and/or the second expression cassette further may comprise an intron. The intron may be a monocot intron in some embodiments. In other embodiments, the monocot intron may be a rice intron.

[0070] In some embodiments where the intron is a rice intron, the rice intron may be an intron of the rice Metallothionin1 gene (Met1-1). In other embodiments, the rice intron may be an intron of the rice MADS3 gene (MADS3). In specific embodiments, the rice intron is the intron of the rice Met1-1 gene comprising the nucleotide sequence of SEQ ID NO: 111 or a nucleotide sequence having at least 90% identity to the nucleotide sequence of SEQ ID NO: 111. In other specific embodiments, the rice intron is the intron of the rice MADS3 gene comprising the nucleotide sequence of SEQ ID NO: 112 or a nucleotide sequence having at least 90% identity to the nucleotide sequence of SEQ ID NO: 112.

[0071] In further embodiments, any of the aforementioned expression cassettes may further comprise a nucleotide sequence encoding a transit peptide targeting the polypeptide to a plastid. In one specific embodiment, the first expression cassette of the recombinant construct may further comprise a nucleotide sequence that is heterologous to the first nucleic acid molecule and encodes a transit peptide targeting the polypeptide encoded by said first nucleic acid molecule to a plastid. In another embodiment, the second expression cassette of the recombinant construct may further comprise a nucleotide sequence that is heterologous to the second nucleic acid molecule and encodes a transit peptide targeting the polypeptide encoded by said second nucleic acid molecule to a plastid.

[0072] In some specific embodiments, the transit peptide is a plastid-targeting peptide from a ferredoxin gene or a malate dehydrogenase gene. In other specific embodiments, the nucleotide sequence encoding a transit peptide comprises:

[0073] (a) the nucleotide sequence of SEQ ID NO: 113 or 138;

[0074] (b) a nucleotide sequence encoding the amino acid sequence of SEQ ID NO: 114 or 139; or

[0075] (c) a nucleotide sequence encoding a peptide having at least 95% identity to the amino acid sequence of SEQ ID NO: 114 or 139.

[0076] In other embodiments, any of the expression cassettes may further comprise a terminator. In particular embodiments, the terminator comprises the nucleotide sequence of SEQ ID NO: 115 or 116, or a nucleotide sequence having at least 90% identity to the nucleotide sequence of SEQ ID NO: 115 or 116.

[0077] In some specific embodiments, the first nucleic acid molecule of the recombinant construct or expression cassette may comprise:

[0078] (a) a nucleotide sequence having at least 95% identity to the nucleotide sequence of SEQ ID NO: 120, 122, 123 or 125; or

[0079] (b) a nucleotide sequence encoding an amino acid sequence having at least 95% identity to the amino acid sequence of SEQ ID NO: 121 or 124.

[0080] In other specific embodiments, the second nucleic acid molecule of the recombinant construct or expression cassette may comprise:

[0081] (a) a nucleotide sequence having at least 95% identity to the nucleotide sequence of SEQ ID NO: 1, 3, 5, 7, 9, 11, 13, 87 or 89; or

[0082] (b) a nucleotide sequence encoding an amino acid sequence having at least 95% identity to the amino acid sequence of SEQ ID NO: 2, 4, 6, 8, 10, 12, 14, 88 or 90.

[0083] In further specific embodiments, the second nucleic acid molecule of the recombinant construct or expression cassette may comprise:

[0084] (a) the nucleotide sequence of SEQ ID NO: 1, 3, 5, 7, 9, 11, 13, 15, 17, 19, 21, 23, 25, 27, 29, 31, 33, 35, 37, 39, 41, 43, 45, 47, 49, 51, 53, 55, 57, 59, 61, 63, 65, 67, 69, 71, 73, 75, 77, 79, 81, 83, 87 or 89; or

[0085] (b) a nucleotide sequence encoding the amino acid sequence of SEQ ID NO: 2, 4, 6, 8, 10, 12, 14, 16, 18, 20, 22, 24, 26, 28, 30, 32, 34, 36, 38, 40, 42, 44, 46, 48, 50, 52, 54, 56, 58, 60, 62, 64, 66, 68, 70, 72, 74, 76, 78, 80, 82, 84, 88 or 90.

[0086] In another specific embodiment, the first promoter of the recombinant construct or expression cassette is a constitutive promoter and the second promoter is an endosperm-specific or endosperm-preferential promoter.

[0087] In a further specific embodiment, the first expression cassette may comprise: the nucleotide sequence of SEQ ID NO: 110; the nucleotide sequence of SEQ ID NO: 111; a nucleotide sequence encoding the amino acid sequence of SEQ ID NO: 124; and the nucleotide sequence of SEQ ID NO: 116,

[0088] and the second expression cassette may comprise: the nucleotide sequence of SEQ ID NO: 106; the nucleotide sequence of SEQ ID NO: 112; a nucleotide sequence encoding the amino acid sequence of SEQ ID NO: 114; a nucleotide sequence encoding the amino acid sequence of SEQ ID NO: 2; and the nucleotide sequence of SEQ ID NO: 115.

[0089] In another aspect, expression cassettes of the invention confer an increased content in one or more of protein, oil, or one or more amino acids in said plant, plant cell, or plant part relative to a corresponding wild-type plant, plant cell, or plant part. In another aspect, expression of the first expression cassette and/or the expression of the second expression cassette in a plant, plant cell, or plant part may confer increased content in protein and one or more amino acids in said plant, plant cell, or plant part relative to a corresponding wild-type plant, plant cell, or plant part. In yet another aspect, expression of the first expression cassette and/or the expression of the second expression cassette in a plant, plant cell, or plant part may confer increased content in oil and one or more amino acids in said plant, plant cell, or plant part relative to a corresponding wild-type plant, plant cell, or plant part. In a preferred embodiment, the expression of the nucleic acid molecule comprised in any of the expression cassettes in a plant, plant cell, or plant part confers increased content of protein, oil, and one or more amino acids in said plant, plant cell, or plant part relative to a corresponding wild-type plant, plant cell, or plant part.

[0090] The invention further provides vectors comprising any one of the aforementioned recombinant constructs or more than one of the aforementioned expression cassettes.

[0091] The invention also provides a microorganism comprising any one of the aforementioned recombinant constructs or more than one of the aforementioned expression cassettes, or a vector comprising any one of the aforementioned recombinant constructs or more than one of the aforementioned expression cassettes.

[0092] In another aspect the invention provides a plant, plant cell, or plant part comprising any one of the aforementioned recombinant constructs or more than one of the aforementioned expression cassettes, wherein the plant, plant cell, or plant part has increased content in one or more of protein, oil, or one or more amino acids relative to a corresponding wild-type plant, plant cell, or plant part. In a further specific embodiment, the plant, plant cell, or plant part of the invention has increased content in protein and one or more amino acids in said plant, plant cell, or plant part relative to a corresponding wild-type plant, plant cell, or plant part. In another embodiment, the plant, plant cell, or plant part of the invention has increased content in oil and one or more amino acids in said plant, plant cell, or plant part relative to a corresponding wild-type plant, plant cell, or plant part. In some specific embodiments, the plant, plant cell, or plant part of the invention has increased content of protein, oil, and one or more amino acids relative to a corresponding wild-type plant, plant cell, or plant part.

[0093] In some embodiments, the plant is a monocotyledonous plant or the plant cell or plant part is from a monocotyledonous plant. In other embodiments, the plant is a maize plant or the plant cell or plant part is from a maize plant. In further specific embodiments, the plant part is a seed.

[0094] In yet another aspect, the invention provides a food or feed composition comprising any of the aforementioned plants, plant cells, or plant parts.

[0095] In some embodiments, the food or feed composition is not supplemented with additional protein, oil, or amino acids. In other embodiments, the food or feed composition has reduced supplementation with protein, oil, or amino acids relative to a food or feed composition comprising a corresponding wild-type plant, plant cell, or plant part. In specific embodiments, the feed composition may be formulated to meet the dietary requirements of swine, poultry, cattle, or companion animals.

[0096] Further, the invention provides a method for producing a transgenic plant, plant cell, or plant part having increased content in one or more of protein, oil, or one or more amino acids relative to a corresponding wild-type plant, plant cell, or plant part, comprising:

[0097] (a) transforming a plant, plant cell, or plant part with any of the aforementioned recombinant constructs or comprising more than one of the aforementioned expression cassettes, or a vector comprising any of the aforementioned recombinant constructs or comprising more than one of the aforementioned expression cassettes, and

[0098] (b) optionally regenerating from the plant cell or plant part a transgenic plant,

[0099] wherein the transgenic plant, plant cell, or plant part has increased content in one or more of protein, oil, or one or more amino acids relative to a corresponding wild-type plant, plant cell, or plant part.

[0100] In a further aspect, the method for producing a transgenic plant, plant cell, or plant part comprise transforming the plant, plant cell or plant part with a first expression cassette and a second expression cassette as described above that are on separate vectors.

[0101] In yet another aspect, the invention provides a method for increasing the content of one or more of protein, oil, or one or more amino acids in a plant, plant cell, or plant part relative to a corresponding wild-type plant, plant cell, or plant part, comprising:

[0102] (a) obtaining any of the aforementioned plants, plant cells, or plant parts; and

[0103] (b) selecting a plant, plant cell, or plant part with increased content in one or more of protein, oil, or one or more amino acids.

[0104] In some embodiments, the content of one or more amino acids in the plant, plant cell, or plant part obtained from any of the aforementioned methods is increased relative to a corresponding wild-type plant, plant cell, or plant part. In other embodiments, the content of protein in the plant, plant cell, or plant part obtained from any of the aforementioned methods is increased relative to a corresponding wild-type plant, plant cell, or plant part. In yet further embodiments, the content of oil in the plant, plant cell, or plant part obtained from any of the aforementioned methods is increased relative to a corresponding wild-type plant, plant cell, or plant part. In another embodiment, the content of oil and one or more amino acids in a plant, plant cell, or plant part is increased relative to a corresponding wild-type plant, plant cell, or plant part. In a further embodiment, the content of protein and one or more amino acids in a plant, plant cell, or plant part is increased relative to a corresponding wild-type plant, plant cell, or plant part. In specific embodiments, the content of protein, oil and one or more amino acids in the plant, plant cell, or plant part obtained from any of the aforementioned methods is increased relative to a corresponding wild-type plant, plant cell, or plant part.

[0105] In some particular embodiments, the plant, plant cell, or plant part obtained from any of the aforementioned methods has an increased content of one or more amino acids selected from the group consisting of arginine, cysteine, isoleucine, lysine, methionine, threonine, and valine. In other particular embodiments, the content of at least two amino acids in the plant, plant cell, or plant part is increased. In yet further embodiments, the content of two, three, four, five, six, or seven amino acids in the plant, plant cell, or plant part is increased relative to a corresponding wild-type plant, plant cell, or plant part.

[0106] In still yet a further aspect, the invention provides a method for producing a transgenic plant, plant cell, or plant part having increased content in one or more of protein, oil, or one or more amino acids relative to a corresponding wild-type plant, plant cell, or plant part, comprising:

[0107] (a) transforming a plant, plant cell, or plant part with the first expression cassette as described above and regenerating from the plant, plant cell or plant part a first transgenic plant;

[0108] (b) transforming a plant, plant cell, or plant part with the second expression cassette as described above and regenerating from the plant, plant cell or plant part a second transgenic plant;

[0109] (c) crossing the first transgenic plant or progeny thereof with the second transgenic plant or progeny thereof to produce a transgenic plant comprising the first expression cassette and the second expression cassette;

[0110] wherein the transgenic plant comprising the first expression cassette and the second expression cassette has increased content in one or more of protein, oil, or one or more amino acids relative to a corresponding wild-type plant.

[0111] In still a further aspect, the invention provides a method of producing a food or feed composition comprising:

[0112] (a) obtaining a plant, plant cell, or plant part having increased content in one or more of protein, oil, or one or more amino acids relative to a corresponding wild-type plant, plant cell, or plant part according to any of the aforementioned methods;

[0113] (b) producing a food or feed composition comprising said plant, plant cell, or plant part.

[0114] In yet a further aspect, the invention provides a method for producing a hybrid maize plant or seed comprising:

[0115] (a) crossing a first inbred parent maize plant with a second inbred parent maize plant;

[0116] (b) harvesting a resultant hybrid maize seed; and

[0117] (c) optionally growing a hybrid maize plant from the resultant hybrid maize seed,

[0118] wherein said first inbred parent maize plant, and optionally said second inbred parent maize plant, comprises any of the aforementioned recombinant constructs or comprising more than one of the aforementioned expression cassettes.

[0119] In still yet a further aspect, the invention provides a method for producing a hybrid maize plant or seed comprising:

[0120] (a) crossing a first inbred parent maize plant with a second inbred parent maize plant;

[0121] (b) harvesting a resultant hybrid maize seed; and

[0122] (c) optionally growing a hybrid maize plant from the resultant hybrid maize seed,

[0123] wherein said first inbred parent maize plant comprises the first expression cassette as described above, and said second inbred parent maize plant comprises the second expression cassette as described above.

[0124] The invention further provides a hybrid maize plant or seed produced by the aforementioned method. The invention additionally provides a plant produced by growing the aforementioned hybrid maize seed.

[0125] In still another further aspect, the invention provides a plant breeding program comprising utilizing any of the aforementioned plants, plant cells, or plant parts as a source of plant breeding material, wherein the plant, plant cell, or plant part has increased content in one or more of protein, oil, or one or more amino acids relative to a corresponding wild-type plant, plant cell, or plant part. The invention additionally provides a plant, plant cell, or plant part obtained from the aforementioned plant breeding program.

[0126] In yet another further aspect, the invention provides a method for developing a maize plant in a maize plant breeding program using plant breeding techniques comprising employing a maize plant, or its parts, as a source of plant breeding material, wherein the maize plant, or its parts, comprises any of the aforementioned recombinant constructs or comprising more than one of the aforementioned expression cassettes or comprising the first expression cassette and the second expression cassette as described above. The invention further provides a maize plant obtained from the aforemention method.

[0127] In a further embodiment, the invention provides a method for developing a maize plant in a maize plant breeding program using plant breeding techniques comprising employing a first maize plant, or its parts, and a second maize plant, or its parts, as a source of plant breeding material, wherein said first maize plant, or its parts, comprises the first expression cassette as described above, and said second maize plant, or its parts, comprises the second expression cassette as described above. Plant breeding techniques include recurrent selection, backcrossing, pedigree breeding, restriction length polymorphism enhanced selection, genetic marker enhanced selection, and transformation techniques. The invention further provides a maize plant obtained from the aforemention method.

[0128] The invention additionally provides a method of plant breeding, comprising:

[0129] (a) obtaining any of the aforementioned hybrid maize plants;

[0130] (b) crossing said hybrid maize plant with a different maize plant; and

[0131] (c) selecting a resultant progeny with increased content in one or more of protein, oil, or one or more amino acids.

[0132] In a still further aspect, the invention provides a method for producing grain with increased content in one or more of protein, oil, or one or more amino acids, comprising:

[0133] (a) interplanting a first plant and at least one second plant, wherein the first plant comprises any of the aforementioned recombinant constructs or comprising more than one of the aforementioned expression cassettes or comprising the first expression cassette and the second expression cassette as described above;

[0134] (b) growing said first plant and said at least one second plant to obtain preferential inheritance of increased content in one or more of protein, oil, or one or more amino acids in a resultant progeny of said first plant and said at least one second plant; and

[0135] (c) harvesting grain from said resultant progeny.

[0136] In a still further aspect, the invention provides a method for producing grain with increased content in one or more of protein, oil, or one or more amino acids, comprising:

[0137] (a) interplanting a first plant and at least one second plant, wherein the first plant comprises the first expression cassette as described above and the second plant comprises the second expression cassette as described above;

[0138] (b) growing said first plant and said at least one second plant to obtain preferential inheritance of increased content in one or more of protein, oil, or one or more amino acids in a resultant progeny of said first plant and said at least one second plant; and

[0139] (c) harvesting grain from said resultant progeny.

[0140] In further embodiments, the invention provides grains produced by the aforementioned method, wherein the grain has increased content in one or more of protein, oil, or one or more amino acids relative to a corresponding wild-type grain. In other embodiments, the grains produced by the aforementioned method has increased content in one or more amino acids selected from the group consisting of arginine, cysteine, isoleucine, lysine, methionine, threonine, and valine. In specific embodiments, the grain is corn.

[0141] In still yet another aspect, the invention provides a method for producing a maize plant with increased content in one or more of protein, oil, or one or more amino acids, comprising:

[0142] (a) growing a progeny plant obtained from crossing a maize plant comprising any of the aforementioned recombinant constructs or comprising more than one of the aforementioned expression cassettes or comprising the first expression cassette and the second expression cassette as described above with a second maize plant;

[0143] (b) crossing said progeny plant with itself or a different maize plant to produce a resultant seed;

[0144] (c) growing said resultant seed to obtain a progeny plant of a subsequent generation; and

[0145] (d) crossing said progeny plant of a subsequent generation with itself or a different maize plant; and

[0146] (e) repeating steps (b) to (d) for additional 0-5 generations to produce a maize plant with increased content in one or more of protein, oil, or one or more amino acids.

[0147] Another aspect of the invention provides a method for producing a maize plant with increased content in one or more of protein, oil, or one or more amino acids, comprising:

[0148] (a) growing a progeny plant obtained from crossing a first maize plant comprising the first expression cassette as described above with a second maize plant comprising the second expression cassette as described above;

[0149] (b) crossing said progeny plant with itself or a different maize plant to produce a resultant seed;

[0150] (c) growing said resultant seed to obtain a progeny plant of a subsequent generation; and

[0151] (d) crossing said progeny plant of a subsequent generation with itself or a different maize plant; and

[0152] (e) repeating steps (b) to (d) for additional 0-5 generations to produce a maize plant with increased content in one or more of protein, oil, or one or more amino acids.

[0153] In further embodiments, the maize plant produced by the aforementioned method is an inbred maize plant. In other embodiments, the aforementioned method may further comprise crossing the inbred maize plant with a second, distinct inbred maize plant to produce an F1 hybrid maize plant.

### DESCRIPTION OF THE FIGURES

[0154] FIG. 1A-O shows the sequence alignment between pyruvate kinases having significant homology to SEQ ID NO: 2 with the conserved Pfam domains identified.

[0155] FIG. 2A-E shows the sequence alignment between pyruvate kinases having significant homology to SEQ ID NO: 10 with the conserved Pfam domains identified.

[0156] FIG. 3A-D shows the sequence alignment between pyruvate kinases having significant homology to SEQ ID NO: 88 with the conserved Pfam domains identified.

[0157] FIG. 4A-B shows the protein-protein identity for extracted domain Pfam:PF00224 pyruvate kinase barrel of pyruvate kinases having significant homology to SEQ ID NO: 2 (“SEQ ID NO: X_POS_Y_Z” indicates that the domain is located between amino acid residue Y and Z of the sequence of SEQ ID NO: X).

[0158] FIG. 5A-B shows the protein-protein identity for extracted domain Pfam:PF02887 pyruvate kinase alpha/beta domain of pyruvate kinases having significant homology to SEQ ID NO: 2 (“SEQ ID NO: X_POS_Y_Z” indicates that the domain is located between amino acid residue Y and Z of the sequence of SEQ ID NO: X).

[0159] FIG. 6 shows the protein-protein identity for extracted domain Pfam:PF00224 pyruvate kinase barrel domain of pyruvate kinases having significant homology to SEQ ID NO: 10 (“SEQ ID NO: X_POS_Y_Z” indicates that the domain is located between amino acid residue Y and Z of the sequence of SEQ ID NO: X).

[0160] FIG. 7 shows the protein-protein identity for extracted domain Pfam:PF02887 pyruvate kinase alpha/beta domain of pyruvate kinases having significant homology to SEQ ID NO: 10 (“SEQ ID NO: X_POS_Y_Z” indicates that the domain is located between amino acid residue Y and Z of the sequence of SEQ ID NO: X).

[0161] FIG. 8 shows the protein-protein identity for extracted domain Pfam:PF00224 pyruvate kinase barrel domain of pyruvate kinases having significant homology to SEQ ID NO: 88 (“SEQ ID NO: X_POS_Y_Z” indicates that the domain is located between amino acid residue Y and Z of the sequence of SEQ ID NO: X).

[0162] FIG. 9 shows the protein-protein identity for extracted domain Pfam:PF02887 pyruvate kinase alpha/beta domain of pyruvate kinases having significant homology to SEQ ID NO: 88 (“SEQ ID NO: X_POS_Y_Z” indicates that the domain is located between amino acid residue Y and Z of the sequence of SEQ ID NO: X).

[0163] FIG. 10A-G shows an amino acid sequence alignment of TPS homologs. Conserved sequence motifs are underlined.

### DESCRIPTION OF THE PREFERRED EMBODIMENTS

[0164] Throughout this application, various publications are referenced. The disclosures of all of these publications and those references cited within those publications are hereby incorporated by reference in their entireties into this application in order to more fully describe the state of the art to which this invention pertains. The terminology used herein is for the purpose of describing specific embodiments only and is not intended to be limiting. As used herein, “a” or “an” can mean one or more, depending upon the context in which it is used. Thus, for example, reference to “a cell” can mean that at least one cell can be used. The term “about” as used herein is to mean approximately, roughly, around, or in the region of. When the term “about” is used in conjunction with a numerical range, it modifies that range by extending the boundaries above and below the numerical values set forth. In general, the term “about” is used herein to modify a numerical value above and below the stated value by a variance of 20%, preferably 10% up or down (higher or lower). The word “comprise,” “comprising,” “include,” “including,” and “includes” as used herein and in the following claims is intended to specify the presence of one or more stated features, integers, components, or steps, but they do not preclude the presence or addition of one or more other features, integers, components, steps, or groups thereof.

[0165] In one aspect, the invention provides various novel expression cassettes conferring increased content in one or more of protein, oil, or one or more amino acids in a plant, plant cell, or plant part relative to a corresponding wild-type plant, plant cell, or plant part. In another aspect, the invention provides methods for overexpressing a pyruvate kinase in a plant, plant cell, or plant part which in turn confers increased content in one or more of protein, oil, or one or more amino acids in a plant, plant cell, or plant part relative to a corresponding wild-type plant, plant cell, or plant part, wherein various expression cassettes of the invention can be used.

[0166] The term “wild-type” as used herein refers to a plant, plant cell, seed, plant component, plant part, plant tissue, plant organ, or whole plant that has not been genetically modified with a polynucleotide in accordance with the invention.

[0167] The term “overexpressing” or “overexpression” as used herein means the level of expression of a nucleic acid molecule or a protein in a plant, plant cell, or plant part is higher or increased relative to its expression in a reference plant, plant cell, or plant part, such as a corresponding wild-type plant, plant cell, or plant part, grown under substantially identical conditions.

### 1. Expression Cassettes

[0168] 1.1 Basic Components

[0169] The expression cassettes of the present invention generally comprise at least two components:

[0170] (a) a promoter that is functional in a plant, and

[0171] (b) a nucleic acid molecule encoding a polypeptide having pyruvate kinase activity, or a nucleic acid molecule encoding a TPS homolog, or a combination thereof,

wherein the nucleic acid molecule is heterologous and operably linked to said promoter, and wherein expression of the nucleic acid molecule in a plant, plant cell, or plant part confers an increase in one or more of protein, oil, or one or more amino acids in a plant, plant cell, or plant part relative to a corresponding wild-type plant, plant cell, or plant part.

[0172] As used herein, the term “nucleic acid,” “nucleic acid molecule,” “polynucleotide,” or “gene” is interchangeable and refers to naturally occurring or synthetic or artificial nucleic acid or polynucleotide. The term “nucleic acid,” “nucleic acid molecule,” “polynucleotide,” or “gene” comprises DNA or RNA or any nucleotide analogue and polymers or hybrids thereof in either linear or branched, single- or double-stranded, sense or antisense form. The term also encompasses RNA/DNA hybrids. Unless otherwise indicated, a particular nucleic acid molecule also implicitly encompasses conservatively modified variants thereof such as, but not limited to, degenerate codon substitutions and complementary sequences as well as the sequence explicitly indicated. A skilled worker will recognize that DNA sequence polymorphisms, which lead to changes in the encoded amino acid sequence, may exist within a population. These genetic polymorphisms in a gene may exist between individuals within a population owing to natural variation. These natural variants usually bring about a variance of 1 to 5% in the nucleotide sequence of a particular gene. Each and every one of these nucleotide variations and resulting amino acid polymorphisms in the encoded polypeptide which are the result of natural variation and do not modify the functional activity are also encompassed by the invention.

[0173] The terms “polypeptide” or “protein” are used interchangeably herein.

[0174] “Expression cassette” as used herein refers to a DNA molecule which includes sequences capable of directing expression of a particular nucleic acid molecule (e.g., which codes for a protein of interest) in an appropriate host cell, including regulatory sequences such as a promoter operably linked to a nucleic acid molecule of interest, optionally associated with transcription termination signals and/or other regulatory elements. An expression cassette may also comprise sequences required for proper translation of the nucleic acid molecule of interest. The expression cassette comprising the nucleic acid molecule of interest may be chimeric, meaning that at least one of its components is heterologous with respect to at least one of its other components. An expression cassette may be assembled entirely extracellularly (e.g., by recombinant cloning techniques). A nucleic acid molecule of interest according to the present invention may preferably encode a pyruvate kinase or a polypeptide having pyruvate kinase activity.

[0175] The term “domain” refers to a set of amino acids conserved at specific positions along an alignment of sequences of evolutionarily related proteins. While amino acids at other positions can vary between homologues, amino acids that are highly conserved at specific positions indicate amino acids that are likely essential in the structure, stability or function of a protein. Identified by their high degree of conservation in aligned sequences of a family of protein homologues, they can be used as identifiers to determine if any polypeptide in question belongs to a previously identified polypeptide family. The term “motif” or “consensus sequence” or “signature” refers to a short conserved region in the sequence of evolutionarily related proteins. Motifs are frequently highly conserved parts of domains, but may also include only part of the domain, or be located outside of conserved domain (if all of the amino acids of the motif fall outside of a defined domain).

[0176] The term “operably linked” or “operable linkage” encompasses, for example, an arrangement of the transcription regulating nucleotide sequence with the nucleic acid sequence to be expressed and, if appropriate, further regulatory elements, such as terminator or enhancers, in such a way that each of the regulatory elements can fulfill its intended function to allow, modify, facilitate or otherwise influence expression of the nucleic acid sequence under the appropriate conditions. Appropriate conditions relate to preferably the presence of the expression cassette in a plant cell. In a preferred arrangement, the nucleic acid sequence is placed down-stream (i.e. in 5′ to 3′-direction) of the transcription regulating nucleotide sequence. Optionally, additional sequences, such as a linker, multiple cloning site, intron, or nucleotide sequence encoding a protein targeting sequence may be inserted between the two sequences.

[0177] The term “heterologous” refers to material (nucleic acid or protein) which is obtained or derived from different source organisms, or, from different genes or proteins in the same source organism or a nucleic acid sequence to which it is not linked in nature or to which it is linked at a different location in nature. For example, a protein-coding nucleic acid sequence operably linked to a promoter which is not the native promoter of this protein-coding sequence is considered to be heterologous to the promoter.

[0178] All percentages of protein, oil, and amino acid content in a plant, plant cell, or plant part recited herein are percent dry weight. Methods for determining and calculating the protein, oil, and amino acid content in a plant, plant cell, or plant part are known in the art and routinely used by a skilled person.

[0179] In one embodiment, the content of one or more amino acids in the plant, plant cell, or plant part of the invention is increased by at least 1%, 2%, 3%, 4%, 5%, 6%, 7%, 8%, 9%, 10%, 15%, 20%, 25%, 30%, 35%, 40%, 45%, 50%, 60%, 70%, 80%, 90%, 100%, or 200% over the content of the corresponding one or more amino acids in a corresponding wild-type plant, plant cell, or plant part. Preferably, the amino acids, of which the content is increased in the plant, plant cell, or plant part of the invention, are selected from the group consisting of arginine, cysteine, isoleucine, lysine, methionine, threonine, and valine. More preferably, the plant, plant cell, or plant part of the invention demonstrates an increased content in one or more amino acids selected from the group consisting of arginine, cysteine, isoleucine, lysine, methionine, threonine, and valine by at least 1%, 2%, 3%, 4%, 5%, 6%, 7%, 8%, 9%, 10%, 15%, 20%, 25%, 30%, 35%, 40%, 45%, 50%, 60%, 70%, 80%, 90%, 100%, or 200% relative to a corresponding wild-type plant, plant cell, or plant part. In other embodiments, the increased content of one or more amino acids is an increase in two, three, four, five, six, or seven amino acids selected from the group consisting of arginine, cysteine, isoleucine, lysine, methionine, threonine, and valine.

[0180] In another embodiment, the oil content of the plant, plant cell, or plant part of the invention is increased by at least 1%, 2%, 3%, 4%, 5%, 6%, 7%, 8%, 9%, 10%, 15%, 20%, 25%, 30%, 35%, 40%, 45%, 50%, 60%, 70%, 80%, 90%, 100%, or 200% over the oil content of the corresponding wild-type plant, plant cell, or plant part.

[0181] In yet another embodiment, the protein content of the plant, plant cell, or plant part of the invention is increased by at least 1%, 2%, 3%, 4%, 5%, 6%, 7%, 8%, 9%, 10%, 15%, 20%, 25%, 30%, 35%, 40%, 45%, 50%, 60%, 70%, 80%, 90%, 100%, or 200% over the protein content of the corresponding wild-type plant, plant cell, or plant part.

[0182] In a further embodiment, the content of protein and one or more amino acids in the plant, plant cell, or plant part of the invention is increased by at least 1%, 2%, 3%, 4%, 5%, 6%, 7%, 8%, 9%, 10%, 15%, 20%, 25%, 30%, 35%, 40%, 45%, 50%, 60%, 70%, 80%, 90%, 100%, or 200% over the content of protein and one or more amino acids in a corresponding wild-type plant, plant cell, or plant part.

[0183] In yet a further embodiment, the content of protein, oil, and one or more amino acids in the plant, plant cell, or plant part of the invention is increased by at least 1%, 2%, 3%, 4%, 5%, 6%, 7%, 8%, 9%, 10%, 15%, 20%, 25%, 30%, 35%, 40%, 45%, 50%, 60%, 70%, 80%, 90%, 100%, or 200% over the content of protein, oil, and one or more amino acids in a corresponding wild-type plant, plant cell, or plant part.

[0184] 1.1.1 Promoters

[0185] The term “promoter” as used herein is equivalent to the terms “promoter element,” “promoter sequence,” or “transcription regulating nucleotide sequence” and refers to a DNA sequence which, when linked to a nucleic acid molecule of interest, is capable of controlling the transcription of the nucleic acid molecule of interest into mRNA. A promoter is typically, though not necessarily, located 5′ (i.e. upstream) of a nucleic acid molecule of interest (e.g., proximal to the transcriptional start site of a structural gene) whose transcription into mRNA it controls, and provides a site for specific binding by RNA polymerase and other transcription factors for initiation of transcription.

[0186] For expressing a nucleic acid molecule of interest according to the present invention, the nucleic acid molecule of interest is operably linked to an appropriate promoter, preferably a promoter that is functional in a plant. Unless specifically provided otherwise, the promoter to be comprised in the expression cassettes of the invention is preferably a promoter that is functional in a plant. As used herein, “a promoter that is functional in a plant” means principally a promoter which is capable of driving the expression of a nucleic acid molecule operably linked thereto, in particular foreign nucleic acid sequences or genes, in plants or plant parts, plant cells, plant tissues, plant cultures. In this context, the expression specificity of said promoter functional in a plant can be, for example, constitutive, inducible, developmentally regulated, tissue-specific or tissue-preferential, organ-specific or organ-preferential, cell type-specific or cell type-preferential, spatial-specific or spatial-preferential, and/or temporal-specific or temporal-preferential.

[0187] Such promoters include, but not limited to, those that can be obtained from plants, plant viruses and bacteria that contain genes that are expressed in plants, such as Agrobacterium and Rhizobium.

[0188] Constitutive promoters are generally active under most environmental conditions and states of development or cell differentiation. Useful constitutive promoters for plants include those obtained from Ti- or Ri-plasmids, from plant cells, plant viruses or other organisms whose promoters are found to be functional in plants. Bacterial promoters that function in plants, and thus are suitable for use in the present invention include, but not limited to, the octopine synthetase promoter, the nopaline synthase promoter, and the mannopine synthetase promoter from the T-DNA of Agrobacterium. Likewise, viral promoters that function in plants can also be used in the present invention. Examples of viral promoters include, but are not limited to, the promoter isolated from sugarcane bacilliform virus (ScBV; U.S. Pat. No. 6,489,462; Nadiya et al., Biotechnology, 2010, published online), the cauliflower mosaic virus (CaMV) 35S transcription initiation region (Franck et al., Cell, 1980, 21: 285-294; Odell et al., Nature, 1985, 313: 810-812; Shewmaker et al., Virology, 1985, 140: 281-288; Gardner et al., Plant Mol. Biol., 1986, 6: 221-228), the cauliflower mosaic virus (CaMV) 19S transcription initiation region (U.S. Pat. No. 5,352,605 and WO 84/02913) and region VI promoters, and the full-length transcript promoter from Figwort mosaic virus. Other suitable constitutive promoters for use in plants include, but are not limited to, actin promoters such as the rice actin promoter (McElroy et al., Plant Cell, 1990, 2: 163-171) or the Arabidopsis actin promoter, histone promoters, tubulin promoters, or the mannopine synthase promoter (MAS), ubiquitin or poly-ubiquitin promoters (Sun and Callis, Plant J., 1997, 11(5): 1017-1027; Cristensen et al., Plant Mol. Biol., 1992, 18: 675-689; Christensen et al., Plant Mol. Biol., 1989 12: 619-632; Bruce et al., Proc. Natl. Acad. Sci. USA, 1989, 86: 9692-9696; Holtorf et al., Plant Mol. Biol., 1995, 29: 637-649; for example, the ubiquitin promoter from Zea mays (SEQ ID NO: 188)), the Mac or DoubleMac promoters (U.S. Pat. No. 5,106,739; Comai et al., Plant Mol. Biol., 1990, 15: 373-381), Rubisco small subunit (SSU) promoter (U.S. Pat. No. 4,962,028), the legumin B promoter (GenBank Ace. No. X03677), the TR dual promoter, the Smas promoter (Velten et al., EMBO J., 1984, 3: 2723-2730), the cinnamyl alcohol dehydrogenase promoter (U.S. Pat. No. 5,683,439), the promoters of the vacuolar ATPase subunits, the pEMU promoter (Last et al., Theor. Appl. Genet., 1991, 81: 581-588), the maize H3 histone promoter (Lepetit et al., Mol. Gen. Genet., 1992, 231: 276-285; Atanassova et al., Plant J., 1992, 2(3): 291-300), β-conglycinin promoter, the phascolin promoter, the ADH promoter, and heat-shock promoters, the nitrilase promoter from Arabidopsis thaliana (WO 03/008596; GenBank Ace. No. U38846, nucleotides 3,862 to 5,325 or else 5,342), promoter of a proline-rich protein from wheat (WO 91/13991), the promoter of the Pisum sativum ptxA gene, and other promoters active in plant cells that are known to those of skill in the art.

[0189] In some embodiments, the expression cassettes of the invention comprise a constitutive promoter. Preferably, the constitutive promoter is isolated from sugarcane bacilliform virus (ScBV). More preferably, the constitutive promoter to be included in the expression cassettes of the invention comprises:

[0190] (a) the nucleotide sequence of SEQ ID NO: 109 or 110;

[0191] (b) a nucleotide sequence having at least 95%, preferably 96%, 97%, 98%, 99%, 99.1%, 99.2%, 99.3%, 99.4%, 99.5%, 99.6%, 99.7%, 99.8%, or 99.9% identity to the nucleotide sequence of SEQ ID NO: 109 or 110, wherein said nucleotide sequence has constitutive expression activity; or

[0192] (c) a fragment of the nucleotide sequence of SEQ ID NO: 109 or 110, wherein the fragment has constitutive expression activity.

[0193] Inducible promoters are active under certain environmental conditions, such as the presence or absence of a nutrient or metabolite, heat or cold, light, pathogen attack, anaerobic conditions, and the like. An inducible promoter can be induced in response to a chemical, environmental or physical stimulus, or may be “stress-inducible,” i.e. activated when a plant is exposed to various stress conditions, or “pathogen-inducible,” i.e. activated when a plant is exposed to exposure to various pathogens. Promoters responding to biotic or abiotic stress conditions are also suitable inducible promoters.

[0194] A cell-specific or cell-preferential, tissue-specific or tissue-preferential, or organ-specific or organ-preferential promoter is one that is capable of preferentially initiating transcription in certain types of cells, tissues, or organs, such as leaves, stems, roots, flowers, fruits, anthers, ovaries, pollen, seed tissue, green tissue, or meristem. A promoter is cell-, tissue- or organ-specific or preferential, if its activity, measured on the amount of RNA produced under control of the promoter, is at least 30%, 40%, 50%, preferably at least 60%, 70%, 80%, 90%, more preferably at least 100%, 200%, 300%, higher in a particular cell-type, tissue or organ, then in other cell-types or tissues of the same plant, preferably the other cell-types or tissues are cell types or tissues of the same plant organ, e.g., leaves or roots. In the case of organ specific or preferential promoters, the promoter activity has to be compared to the promoter activity in other plant organs, e.g., leaves, stems, flowers or seeds. For example, the tissue-specific ES promoter from tomato is particularly useful for directing expression in fruits (see, e.g., Lincoln et al., Proc. Natl. Acad. Sci. USA, 1988, 84: 2793-2797; Deikman et al., EMBO J., 1988, 7: 3315-3320; Deikman et al., Plant Physiol., 1992, 100: 2013-2017). Seed-specific or seed-preferential promoters are preferentially expressed during seed development and/or germination, which can be embryo-, endosperm-, and/or seed coat-specific or preferential. See Thompson et al., BioEs-says, 1989, 10: 108. Examples of seed-specific or preferential promoters include, but are not limited to, the pKG86 promoter from Zea maize (whole seed-specific or whole seed-preferential promoter, for example, SEQ ID NO: 104 or 140), the promoters derived from the globulin 1 gene from maize (ZmGlb1) (for example, SEQ ID NO: 108) (Belanger et al., Genetics, 1991, 129: 863-872), the zein genes from maize, including 10 kDa zein (for example, SEQ ID NO: 106), 19 kDa zein, and 27 kDa zein (for example, SEQ ID NO: 107), the β-glucosidase aggregating factor precursor gene from maize (MAWS21) (for example, SEQ ID NO: 189), the MAC1 gene from maize (Sheridan et al., Genetics, 1996, 142: 1009-1020), the Cat3 gene from maize (GenBank Accession No. L05934), the gene encoding oleosin 18kD from maize (GenBank Accession No. J05212), viviparous-1 gene from Arabidopsis (Genbank Accession No. U93215), the gene encoding oleosin from Arabidopsis (Genbank Accession No. Z17657), the Atmycl gene from Arabidopsis (Urao et al., Plant Mol. Biol., 1996, 32: 571-576), the 2S seed storage protein gene family from Arabidopsis (Conceicao et al., Plant J., 1994, 5: 493-505), the gene encoding oleosin 20 kD from Brassica napus (GenBank Accession No. M63985), the napin gene from Brassica napus (GenBank Accession No. J02798; Joseffson et al., J. Biol. Chem., 1987, 262: 12196-12201), the napin gene family (e.g., from Brassica napus; Sjodahl et al., Planta, 1995, 197: 264-271, U.S. Pat. No. 5,608,152; Stalberg et al., Planta, 1996, 199: 515-519), the gene encoding the 2S storage protein from Brassica napus (Dasgupta et al., Gene, 1993, 133: 301-302), the genes encoding oleosin A (Genbank Accession No. U09118) and oleosin B (Genbank Accession No. U09119) from soybean, the gene encoding low molecular weight sulphur rich protein from soybean (Choi et al., Mol. Gen. Genet., 1995, 246: 266-268), the phaseolin gene (U.S. Pat. No. 5,504,200; Bustos et al., Plant Cell, 1989, 1(9): 839-853; Murai et al., Science, 1983, 23: 476-482; Sengupta-Gopalan et al., Proc. Natl, Acad. Sci. USA, 1985, 82: 3320-3324), the 2S albumin gene, the legumin gene (Shirsat et al., Mol. Gen. Genet., 1989, 215(2): 326-331), the USP (unknown seed protein) gene, the sucrose binding protein gene (WO 00/26388), the legumin B4 gene (LeB4; Fiedler et al., Biotechnology, 1995, 13(10): 1090-1093; Baumlein et al., Plant J., 1992, 2(2): 233-239; Baumlein et al., Mol. Gen. Genet., 1991, 225(3): 459-467; Baumlein et al., Mol. Gen. Genet., 1991, 225: 121-128), the Arabidopsis oleosin gene (WO 98/45461), the Brassica Bce4 gene (WO 91/13980), genes encoding the “high-molecular-weight glutenin” (HMWG), gliadin, branching enzyme, ADP-glucose pyrophosphatase (AGPase) or starch synthase. Further seed specific or preferential promoters include the KG36_{—}12a promoter (SEQ ID NO: 104) and the KG86 promoter (SEQ ID NO: 140).

[0195] Other suitable tissue- or organ-specific or preferential promoters include a leaf-specific and light-induced promoter such as that from cab or Rubisco (Timko et al., Nature, 1985, 318: 579-582; Simpson et al., EMBO J., 1985, 4: 2723-2729), an anther-specific promoter such as that from LAT52 (Twell et al., Mol. Gen. Genet., 1989, 217: 240-245), a pollen-specific promoter such as that from Zm13 (Guerrero et al., Mol. Gen. Genet., 1993, 224: 161-168), and a microspore-preferred promoter such as that from apg (Twell et al., Sex. Plant Reprod., 1983, 6: 217-224). Also suitable promoters are, for example, specific promoters for tubers, storage roots or roots such as, for example, the class I patatin promoter (B33), the potato cathepsin D inhibitor promoter, the starch synthase (GBSS1) promoter or the sporamin promoter, and fruit-specific promoters such as, for example, the tomato fruit-specific promoter (EP 0409625). Promoters which are furthermore suitable are those which ensure leaf-specific or leaf-preferential expression. Further examples of promoters which may be mentioned are the potato cytosolic FBPase promoter (WO 98/18940), the Rubisco (ribulose-1,5-bisphosphate carboxylase) SSU (small subunit) promoter or the potato ST-LSI promoter (Stockhaus et al., EMBO J., 1989, 8(9): 2445-2451). Other suitable promoters are those which govern expression in seeds and plant embryos. Further suitable promoters are, for example, fruit-maturation-specific promoters such as, for example, the tomato fruit-maturation-specific promoter (WO 94/21794), flower-specific promoters such as, for example, the phytoenc synthase promoter (WO 92/16635) or the promoter of the P1-rr gene (WO 98/22593) or another node-specific promoter as described in EP 0249676 may be used advantageously. The promoter may also be a pith-specific promoter, such as the promoter isolated from a plant TrpA gene as described in WO 93/07278.

[0196] In some embodiments, the expression cassettes of the invention comprise a tissue-specific or tissue-preferential promoter. More preferably, the tissue-specific or tissue-preferential promoter is a seed-specific or seed-preferential promoter, such as a whole seed-specific or whole seed-preferential promoter, an endosperm-specific or endosperm-preferential promoter, or an embryo-specific or embryo-preferential promoter.

[0197] In some preferred embodiments, the promoter to be included in the expression cassettes of the invention is a seed-specific or seed-preferential promoter, preferably a whole seed-specific or whole seed-preferential promoter comprising:

[0198] (a) the nucleotide sequence of SEQ ID NO: 104 or 105 or 140;

[0199] (b) a nucleotide sequence having at least 95%, preferably 96%, 97%, 98%, 99%, 99.1%, 99.2%, 99.3%, 99.4%, 99.5%, 99.6%, 99.7%, 99.8%, or 99.9% identity to the nucleotide sequence of SEQ ID NO: 104 or 105 or 140, wherein said nucleotide sequence has seed-specific or seed-preferential expression activity; or

[0200] (c) a fragment of the nucleotide sequence of SEQ ID NO: 104 or 105 or 140, wherein the fragment has seed-specific or seed-preferential expression activity.

[0201] In other preferred embodiments, the promoter to be included in the expression cassettes of the invention is an endosperm-specific or endosperm-preferential promoter, preferably an endosperm-specific or endosperm-preferential promoter comprising:

[0202] (a) the nucleotide sequence of SEQ ID NO: 106, 107, or 189;

[0203] (b) a nucleotide sequence having at least 95%, preferably 96%, 97%, 98%, 99%, 99.1%, 99.2%, 99.3%, 99.4%, 99.5%, 99.6%, 99.7%, 99.8%, or 99.9% identity to the nucleotide sequence of SEQ ID NO: 106, 107, or 189, wherein said nucleotide sequence has endosperm-specific or endosperm-preferential expression activity; or

[0204] (c) a fragment of the nucleotide sequence of SEQ ID NO: 106, 107, or 189, wherein the fragment has endosperm-specific or endosperm-preferential expression activity.

[0205] In yet other preferred embodiments, the promoter to be included in the expression cassettes of the invention is an embryo-specific or embryo-preferential promoter, preferably an embryo-specific or embryo-preferential promoter comprising:

[0206] (a) the nucleotide sequence of SEQ ID NO: 108;

[0207] (b) a nucleotide sequence having at least 95%, preferably 96%, 97%, 98%, 99%, 99.1%, 99.2%, 99.3%, 99.4%, 99.5%, 99.6%, 99.7%, 99.8%, or 99.9% identity to the nucleotide sequence of SEQ ID NO: 108, wherein said nucleotide sequence has embryo-specific or embryo-preferential expression activity; or

[0208] (c) a fragment of the nucleotide sequence of SEQ ID NO: 108, wherein the fragment has embryo-specific or embryo-preferential expression activity.

[0209] Developmentally regulated or developmental stage-preferential promoters are preferentially expressed at certain stages of development. Suitable developmental regulated promoters include, but not limited to, fruit-maturation-specific promoters, such as, for example, the fruit-maturation-specific promoter from tomato (WO 94/21794, EP 0409625). Developmental regulated promoters also include partly the tissue-specific or tissue-preferential promoters described above since individual tissues are, naturally, formed as a function of the development. An example of a development-regulated promoter is described in Baerson et al. (Plant Mol. Biol., 1993, 22(2): 255-267).

[0210] Other promoters or promoter elements suitable for the expression cassettes of the invention include, but not limited to, promoters or promoter elements capable of modifying the expression-governing characteristics. Thus, for example, the tissue-specific or tissue-preferential expression may take place in addition as a function of certain stress factors, owing to genetic control sequences. Such elements are, for example, described for water stress, abscisic acid (Lam and Chua, J. Biol. Chem., 1991, 266(26): 17131-17135) and heat stress (Schoffl et al., Molecular & General Genetics, 1989, 217(2-3): 246-253).

[0211] Unless specifically provided herein, the promoter to be included in the expression cassettes of the invention is a promoter that is functional in a plant.

[0212] 1.1.2 Pyruvate Kinases

[0213] Pyruvate kinase (PK, EC 2.7.1.40) catalyses one of the key control points of glycolysis—the biochemical pathway central to energy metabolism and the production of precursors used in biosynthetic reactions in all living organisms. The enzyme requires magnesium and the majority of the enzymes require potassium ions for its activity and catalyses the transfer of a phosphoryl group from phosphoenolpyruvate (PEP) to adenosine diphosphate (ADP), generating the important biochemical intermediates pyruvate and adenosine triphosphate (ATP).

[0214] In vertebrates, there are four tissue-specific PK isozymes: L (liver), R (red cells), M1 (muscle, heart and brain), and M2 (early foetal tissue). In plants, PK exists as cytosolic (PKc) and plastidic (PKp) isoforms, while most bacteria and lower eukaryotes have one form of PK except in certain bacteria, such as Escherichia coli, that have two isozymes.

[0215] PK helps control the rate of glycolysis, along with phosphofructokinase and hexokinase. PK possesses allosteric sites for numerous effectors, yet the isozymes respond differently, in keeping with their different tissue distributions (Munoz et al., Comp. Biochem. Physiol. B. Biochem. Mol. Biol., 2003, 135(2): 197-218). For example, in vertebrates, the activity of L-type (liver) PK is increased by fructose-1,6-bisphosphate (F1,6BP) and lowered by ATP and alanine (gluconeogenic precursor). As such, when glucose levels are high, glycolysis is promoted, whereas when glucose levels are low, gluconeogenesis is promoted. L-type PK is also hormonally regulated, being activated by insulin and inhibited by glucagon, which covalently modifies the PK enzyme. Conversely, M1-type (muscle and brain) PK is inhibited by ATP, but F1,6BP and alanine have no effect, which correlates with the function of muscle and brain, as opposed to the liver. Similarly, the two forms of PK isolated from E. coli, PK type 1 (PK-I; b1676) and PK type 2 (PK-II; b1854), sharing approximately 37% sequence identity at the amino acid level, differ in the identity of their heterotropic allosteric effector. Although both PK-I (b1676) and PK-II (b1854) are homotropically activated by the substrate PEP, PK-II (b1854) is activated by AMP and monophosphorylated sugars, whereas PK-I (b1676) is activated by F1,6BP (Lovell et al., J. Mol. Biol., 1998, 276: 839-851).

[0216] The structure of several PKs from various organisms have been determined (Valentini et al., J. Biol. Chem., 2002, 277: 23807-23814; Valentini et al., J. Biol. Chem., 2000, 275: 18145-18152). Plant PK proteins comprise the following domains: a small N-terminal helical domain (absent in bacterial PK), a beta/alpha-barrel domain, a beta-barrel domain (inserted within the beta/alpha-barrel domain), and a 3-layer alpha/beta/alpha sandwich domain. The beta/alpha-barrel domain and the beta-barrel domain inserted with it are also collectively identified as Pfam:PF00224 pyruvate kinase barrel domain (see website ebi.ac.uk/interpro/IEntry?ac=IPR015793). It is predicted that this domain comprises the magnesium ion binding site, the potassium ion binding site and the PK active site. The S-layer alpha/beta/alpha sandwich domain is also identified as Pfam:PF02887 pyruvate kinase alpha/beta domain (see website ebi.ac.uk/interpro/ISearch?query=PF02887).

[0217] In plants, both cytosolic (PKc) and plastidic (PKp) PK isoforms differ markedly with respect to their physical, immunological and kinetic characteristics. Cytosolic forms of PK are homomeric, while plastidic forms of PK are generally thought to consist of α and β subunits (Munoz et al., Comp. Biochem. Physiol. B. Biochem. Mol. Biol., 2003, 135(2): 197-218). For instance, plastidic PKs purified from castor (Ricinus communis) endosperm and Brassica napus suspension cell cultures both consist of α- and β-subunits and appear to exist as 3α3β heterohexamers (Plaxton et al., Plant Physiol., 1990, 94: 1528-1534; Plaxton et al., Arch. Biochem. Biophys., 2002, 400: 54-62; Negm et al., Plant Physiol., 1995, 109: 1461-1469).

[0218] Plant PK activities arise from the expression of multiple isozymes with different biochemical properties that depend on the tissue and plant source. Arabidopsis, for example, has 14 annotated PK genes that likely exhibit a large degree of variation with respect to regulation of gene expression and enzyme activity. Among these 14 putative isoforms of PK, three are identified to be plastidic, two β-forms and one α-form (Andre et al., Plant Cell, 2007, 19: 2006-2022). Despite the potential variation in gene regulation and enzyme activity, all but one (encoded by At3g49160) of the predicted PKs contain a fully conserved PK active site of [LIVAC]-x-[LIVM-[LIVM]-[SAPCV]-K-[LIV]-E-NKRST]-x-[DEQHS]-[GSTA]-[LIVM] (SEQ ID NO: 101) and are presumably active enzymes (Andre et al., Plant Cell, 2007, 19: 2006-2022). In addition to the conserved PK active site, plant PKs also contain the two conserved Pfam domains as the other PKs found in other organisms: the Pfam:PF00224 pyruvate kinase barrel domain and the Pfam:PF02887 pyruvate kinase alpha/beta domain.

[0219] It is found that, by expressing certain pyruvate kinases in a plant, plant cell, or plant part under control of some specific types of promoters, optionally in combination with other regulatory elements and/or targeting peptides, the content of one or more of protein, oil, and/or one or more amino acids in such a plant, plant cell, or plant part is surprisingly increased. Accordingly, in one aspect, the invention provides an expression cassette capable of expressing a nucleic acid molecule encoding a pyruvate kinase or a polypeptide having pyruvate kinase activity in a plant, plant cell, or plant part, wherein the expression of such a nucleic acid molecule confers increased content in one or more of protein, oil, or one or more amino acids in said plant, plant cell, or plant part relative to a corresponding wild-type plant, plant cell, or plant part. In another aspect, the expression of the nucleic acid molecule comprised in the expression cassettes of the invention confers increased content in protein and one or more amino acids in such a plant, plant cell, or plant part relative to a corresponding wild-type plant, plant cell, or plant part. In another embodiment, the expression of the nucleic acid molecule comprised in the expression cassette of the invention confers increased content in oil and one or more amino acids in a plant, plant cell, or plant part relative to a corresponding wild-type plant, plant cell, or plant part. In yet another aspect, the expression of the nucleic acid molecule comprised in the expression cassettes of the invention confers increased content in protein, oil and one or more amino acids in such a plant, plant cell, or plant part relative to a corresponding wild-type plant, plant cell, or plant part.

[0220] In some embodiments, the pyruvate kinases or the polypeptides having pyruvate kinase activity suitable for the present invention comprise the amino acid sequence of SEQ ID NO: 2, 4, 6, 8, 10, 12, 14, 16, 18, 20, 22, 24, 26, 28, 30, 32, 34, 36, 38, 40, 42, 44, 46, 48, 50, 52, 54, 56, 58, 60, 62, 64, 66, 68, 70, 72, 74, 76, 78, 80, 82, 84, 86, 88, 90, 92, 94, 96, 98, or 100, or functional variants thereof, or encoded by a nucleic acid molecule comprising the polynucleotide sequence of SEQ ID NO: 1, 3, 5, 7, 9, 11, 13, 15, 17, 19, 21, 23, 25, 27, 29, 31, 33, 35, 37, 39, 41, 43, 45, 47, 49, 51, 53, 55, 57, 59, 61, 63, 65, 67, 69, 71, 73, 75, 77, 79, 81, 83, 85, 87, 89, 91, 93, 95, 97, or 99, or functional variants thereof. In preferred embodiments, the pyruvate kinase suitable for the present invention comprises the amino acid sequence of SEQ ID NO: 2 (100% identical to SEQ ID NO: 4, 6, and 8), SEQ ID NO: 10 (100% identical to SEQ ID NO: 12 and 14), or SEQ ID NO: 88 (100% identical to SEQ ID NO: 90), or functional variants thereof, or encoded by a nucleic acid molecule comprising the polynucleotide sequence of SEQ ID NO: 1, 3, 5, 7, 9, 11, 13, 87, or 89, or functional variants thereof.

[0221] The pyruvate kinase comprising the amino acid sequence of SEQ ID NO: 2 corresponds to the pyruvate kinase PKp-β1 of Arabidopsis thaliana encoded by At5g52920 (PKpAt920). Other pyruvate kinases or the polypeptides having pyruvate kinase activity sharing significant sequence homology with the pyruvate kinase PKp-β1 (PKpAt920; SEQ ID NO: 2) include, but not limited to, the PKs provided in Table 1.

TABLE 1
Examples of PKs with significant sequence homology with the
pyruvate kinase PKp-β1 (PKpAt920; SEQ ID NO: 2).

| | | | Global amino |
|---|---|---|---|
| PK Gene SEQ ID NO | | | acid % identity |
| Nucleic Acid | Amino Acid | Organism | to SEQ ID NO: 2 |
| 3 | 4 | Arabidopsis thaliana | 89.1 |
| 5 | 6 | Arabidopsis thaliana | 88.7 |
| 7 | 8 | Synthetic | 100 |
| 9 | 10 | Arabidopsis thaliana | 64.2 |
| 11 | 12 | Arabidopsis thaliana | 61.3 |
| 13 | 14 | Synthetic | 64.2 |
| 15 | 16 | Linum usitatissimum | 80.6 |
| 17 | 18 | Synthetic | 80.6 |
| 19 | 20 | Arabidopsis thaliana | 99.8 |
| 21 | 22 | Arabidopsis thaliana | 99.8 |
| 23 | 24 | Arabidopsis thaliana | 99.7 |
| 25 | 26 | Synthetic | 96.4 |
| 27 | 28 | Brassica napus | 95.7 |
| 29 | 30 | Brassica napus | 95.5 |
| 31 | 32 | Ricinus communis | 84.8 |
| 33 | 34 | Vitis vinifera | 83.2 |
| 35 | 36 | Vitis vinifera | 83.1 |
| 37 | 38 | Populus trichocarpa | 82.9 |
| 39 | 40 | Vitis vinifera | 82.8 |
| 41 | 42 | Glycine max | 81.6 |
| 43 | 44 | Glycine max | 81.3 |
| 45 | 46 | Glycine max | 81.2 |
| 47 | 48 | Glycine max | 81.1 |
| 49 | 50 | Glycine max | 80.8 |
| 51 | 52 | Glycine max | 80.7 |
| 53 | 54 | Glycine max | 80.2 |
| 59 | 60 | Brassica napus | 64.4 |
| 67 | 68 | Helianthus annuus | 77.1 |
| 69 | 70 | Synthetic | 77.1 |

[0222] The pyruvate kinase comprising the amino acid sequence of SEQ ID NO: 10 corresponds to the pyruvate kinase PKp-β2 of Arabidopsis thaliana encoded by At1g32440 (PKpAt440). Other pyruvate kinases or the polypeptides having pyruvate kinase activity sharing significant sequence homology with the pyruvate kinase PKp-β2 (PKpAt440; SEQ ID NO: 10) include, but not limited to, the PKs provided in Table 2.

TABLE 2
Examples of PKs with significant sequence homology with the
pyruvate kinase PKp-β2 (PKpAt440; SEQ ID NO: 10).

| | | | Global amino |
|---|---|---|---|
| PK Gene SEQ ID NO | | | acid % identity to |
| Nucleic Acid | Amino Acid | Organism | SEQ ID NO: 10 |
| 1 | 2 | Arabidopsis thaliana | 64.2 |
| 3 | 4 | Arabidopsis thaliana | 62.9 |
| 5 | 6 | Arabidopsis thaliana | 57 |
| 7 | 8 | Synthetic | 64.2 |
| 11 | 12 | Arabidopsis thaliana | 90.4 |
| 13 | 14 | Synthetic | 100 |
| 15 | 16 | Linum usitatissimum | 66.7 |
| 17 | 18 | Synthetic | 66.7 |
| 55 | 56 | Arabidopsis thaliana | 99.1 |
| 57 | 58 | Arabidopsis lyrata | 96.7 |
| | | subsp. lyrata | |
| 59 | 60 | Brassica napus | 91.6 |
| 67 | 68 | Helianthus annuus | 65.5 |
| 69 | 70 | Synthetic | 65.5 |

[0223] Both PKp-β1 (PKpAt920; SEQ ID NO: 2) and PKp-β2 (PKpAt440; SEQ ID NO: 10) are identified as being plastid localized with a chloroplast targeting signal of 63 and 55 amino acids, respectively (Andre et al., Plant Cell, 2007, 19: 2006-2022). Other pyruvate kinases or polypeptides having pyruvate kinase activity that are identified as being plastid localized (i.e. plastidic PKs) include, but not limited to, the PKs provided in Table 3.

TABLE 3
Examples of plastidic pyruvate kinases.

| PK Gene SEQ ID NO | | |
|---|---|---|
| Nucleic acid | Amino acid | |
| SEQ ID NO | SEQ ID NO | Organism |
| 5 | 6 | Arabidopsis thaliana |
| 7 | 8 | Synthetic |
| 13 | 14 | Synthetic |
| 15 | 16 | Linum usitatissimum |
| 17 | 18 | Synthetic |
| 59 | 60 | Brassica napus |
| 61 | 62 | Zea mays |
| 63 | 64 | Helianthus annuus |
| 65 | 66 | Synthetic |
| 67 | 68 | Helianthus annuus |
| 69 | 70 | Synthetic |
| 83 | 84 | Arabidopsis thaliana |

[0224] The pyruvate kinase comprising the amino acid sequence of SEQ ID NO: 88 corresponds to the pyruvate kinase II of Escherichia coli (b1854). Other pyruvate kinases or the polypeptides having pyruvate kinase activity sharing significant sequence homology with the pyruvate kinase b1854 (SEQ ID NO: 88) include, but not limited to, the PKs provided in Table 4.

TABLE 4
Examples of PKs with significant sequence homology
with the pyruvate kinase II of Escherichia coli (b1854;
SEQ ID NO: 88).

| PK Gene SEQ ID NO | | | Global amino |
|---|---|---|---|
| Nucleic | | | acid % identity to |
| Acid | Amino Acid | Organism | SEQ ID NO: 88 |
| 75 | 76 | Pectobacterium wasabiae | 91 |
| 89 | 90 | Synthetic | 100 |
| 91 | 92 | Escherichia coli B185 | 99.8 |
| 93 | 94 | Escherichia coli 2362-75 | 99.6 |
| 95 | 96 | Photorhabdus luminescens | 86.9 |
| | | subsp. laumondii TTO1 | |
| 97 | 98 | Photorhabdus asymbiotica | 85.6 |
| | | subsp. asymbiotica ATCC | |
| | | 43949 | |
| 99 | 100 | Actinobacillus | 80.2 |
| | | succinogenes 130Z | |

[0225] Contrary to PKp-β1 and PKp-β2, the pyruvate kinase II of Escherichia coli (b1854; SEQ ID NO: 88) is a cytosolic pyruvate kinase which does not contain any targeting signal. Other pyruvate kinases or polypeptides having pyruvate kinase activity that are identified as being cytosolic form of PK (i.e. cytosolic PKs) include, but not limited to, the PKs provided in Table 5.

TABLE 5
Examples of cytosolic pyruvate kinases.

| PK Gene SEQ ID NO | | |
|---|---|---|
| Nucleic acid | Amino acid | |
| SEQ ID NO | SEQ ID NO | Organism |
| 71 | 72 | Helianthus annuus |
| 73 | 74 | Synthetic |
| 75 | 76 | Pectobacterium wasabiae |
| 77 | 78 | Zymomonas mobilis |
| 79 | 80 | Photobacterium profundum |
| 81 | 82 | Arabidopsis thaliana |
| 85 | 86 | Escherichia coli |
| 89 | 90 | Synthetic |

[0226] In other embodiments, the pyruvate kinases or the polypeptides having pyruvate kinase activity suitable for the present invention comprise a Pfam:PF00224 pyruvate kinase barrel domain and a Pfam:PF02887 pyruvate kinase alpha/beta domain. Examples of such pyruvate kinases or such polypeptides having pyruvate kinase activity and the location of their corresponding Pfam domains are provided in Table 6. Sequence alignments between various pyruvate kinases are also provided in FIGS. 1 to 3 with the conserved Pfam domains and PK active site identified. The level of homology between various pyruvate kinases within the region of the conserved Pfam domains are also provided in FIGS. 4 to 9.

TABLE 6
Pfam:PF00224 pyruvate kinase barrel domain and Pfam:PF02887 pyruvate kinase alpha/beta domain in the amino acid
sequences of pyruvate kinases.

| | | | | | | | | Pfam:PF02887 pyruvate kinase alpha/beta | | | | |
|---|---|---|---|---|---|---|---|---|---|---|---|---|
| | | | Pfam:PF00224 pyruvate kinase barrel domain | | | | | domain | | | | |
| | | | | | % | % | % | | | % | % | % |
| PK Gene | | | | | identity | identity | identity | | | identity | identity | identity |
| SEQ ID NO | | | | | to SEQ | to SEQ | to SEQ | | | to SEQ | to SEQ | to SEQ |
| Nucleic | Amino | | Pfam | Pfam | ID NO: | ID NO: | ID NO: | Pfam | Pfam | ID NO: | ID NO: | ID NO: |
| Acid | Acid | Organism | Start | End | 2 | 10 | 88 | Start | End | 2 | 10 | 88 |
| 1 | 2 | Arabidopsis | 109 | 449 | 100 | 81.1 | 37.4 | 462 | 578 | 100 | 64.1 | 22.7 |
| | | thaliana | | | | | | | | | | |
| 3 | 4 | Arabidopsis | 46 | 386 | 100 | 81.1 | 37.4 | 399 | 515 | 100 | 64.1 | 22.7 |
| | | thaliana | | | | | | | | | | |
| 5 | 6 | Arabidopsis | 183 | 523 | 100 | 81.1 | 37.4 | 536 | 652 | 100 | 64.1 | 22.7 |
| | | thaliana | | | | | | | | | | |
| 7 | 8 | Synthetic | 109 | 449 | 100 | 81.1 | 37.4 | 462 | 578 | 100 | 64.1 | 22.7 |
| 9 | 10 | Arabidopsis | 98 | 439 | 81.1 | 100 | 36.2 | 452 | 566 | 64.1 | 100 | 24.2 |
| | | thaliana | | | | | | | | | | |
| 11 | 12 | Arabidopsis | 43 | 384 | 81.1 | 100 | 36.2 | 397 | 511 | 64.1 | 100 | 24.2 |
| | | thaliana | | | | | | | | | | |
| 13 | 14 | Synthetic | 98 | 439 | 81.1 | 100 | 36.2 | 452 | 566 | 64.1 | 100 | 24.2 |
| 15 | 16 | Linum | 95 | 435 | 90.6 | 82.6 | 38.3 | 448 | 563 | 82.1 | 65.8 | 24.6 |
| | | usitatissimum | | | | | | | | | | |
| 17 | 18 | Synthetic | 95 | 435 | 90.6 | 82.6 | 38.3 | 448 | 563 | 82.1 | 65.8 | 24.6 |
| 19 | 20 | Arabidopsis | 109 | 449 | 99.7 | 81.1 | 37.1 | 462 | 578 | 100 | 64.1 | 22.7 |
| | | thaliana | | | | | | | | | | |
| 21 | 22 | Arabidopsis | 109 | 449 | 99.7 | 80.8 | 37.1 | 462 | 578 | 100 | 64.1 | 22.7 |
| | | thaliana | | | | | | | | | | |
| 23 | 24 | Arabidopsis | 109 | 449 | 100 | 81.1 | 37.4 | 462 | 578 | 99.1 | 65 | 22.7 |
| | | thaliana | | | | | | | | | | |
| 25 | 26 | Synthetic | 109 | 450 | 97.1 | 81 | 37.1 | 463 | 579 | 98.3 | 63.2 | 22.7 |
| 27 | 28 | Brassica napus | 109 | 450 | 96.8 | 80.7 | 36.9 | 463 | 579 | 95.7 | 65.8 | 22.7 |
| 29 | 30 | Brassica napus | 109 | 450 | 96.5 | 81.3 | 37.1 | 463 | 579 | 95.7 | 65.8 | 22.7 |
| 31 | 32 | Ricinus | 110 | 450 | 91.5 | 83.9 | 37.8 | 463 | 578 | 87.2 | 67.5 | 25.4 |
| | | communis | | | | | | | | | | |
| 33 | 34 | Vitis vinifera | 107 | 447 | 90.3 | 83.8 | 37.6 | 460 | 575 | 83.8 | 69.2 | 26.3 |
| 35 | 36 | Vitis vinifera | 106 | 446 | 90.3 | 83.8 | 37.6 | 459 | 574 | 83.8 | 69.2 | 26.3 |
| 37 | 38 | Populus | 112 | 452 | 92.4 | 82.5 | 37.8 | 465 | 580 | 85.5 | 65.8 | 23.7 |
| | | trichocarpa | | | | | | | | | | |
| 39 | 40 | Vitis vinifera | 106 | 450 | 89.3 | 82.8 | 37.2 | 463 | 578 | 84.6 | 68.4 | 26.3 |
| 41 | 42 | Glycine max | 107 | 447 | 90.6 | 83.6 | 37.6 | 460 | 575 | 83.8 | 67.5 | 27.1 |
| 43 | 44 | Glycine max | 105 | 445 | 89.4 | 83.6 | 37.1 | 458 | 573 | 85.5 | 67.5 | 27.1 |
| 45 | 46 | Glycine max | 105 | 445 | 89.1 | 83.3 | 36.8 | 458 | 573 | 85.5 | 67.5 | 27.1 |
| 47 | 48 | Glycine max | 107 | 447 | 90.3 | 83.3 | 37.1 | 460 | 575 | 82.9 | 67.5 | 25.4 |
| 49 | 50 | Glycine max | 105 | 445 | 89.4 | 83.6 | 37.1 | 458 | 573 | 85.5 | 67.5 | 27.1 |
| 51 | 52 | Glycine max | 105 | 445 | 89.4 | 83.6 | 37.1 | 458 | 573 | 85.5 | 67.5 | 27.1 |
| 53 | 54 | Glycine max | 105 | 445 | 89.4 | 83.6 | 37.1 | 458 | 573 | 84.6 | 67.5 | 27.1 |
| 55 | 56 | Arabidopsis | 98 | 435 | 80.8 | 98.5 | 35.9 | 448 | 562 | 64.1 | 100 | 24.2 |
| | | thaliana | | | | | | | | | | |
| 57 | 58 | Arabidopsis | 97 | 438 | 81.4 | 99.7 | 36.2 | 451 | 565 | 64.1 | 99.1 | 24.2 |
| | | lyrata subsp. | | | | | | | | | | |
| | | lyrata | | | | | | | | | | |
| 59 | 60 | Brassica napus | 99 | 440 | 80.8 | 98.8 | 35.9 | 452 | 567 | 65 | 94.8 | 25.8 |
| 61 | 62 | Zea mays | 68 | 420 | 48.3 | 47 | 34.6 | 438 | 547 | 30.5 | 30.5 | 28.2 |
| 63 | 64 | Helianthus | 93 | 446 | 50.3 | 49.9 | 35.5 | 463 | 572 | 31.4 | 33.9 | 29.1 |
| | | annuus | | | | | | | | | | |
| 65 | 66 | Synthetic | 93 | 446 | 50.3 | 49.9 | 35.5 | 463 | 572 | 31.4 | 33.9 | 29.1 |
| 67 | 68 | Helianthus | 110 | 449 | 88 | 81.9 | 38.6 | 463 | 578 | 81.2 | 65.8 | 26.3 |
| | | annuus | | | | | | | | | | |
| 69 | 70 | Synthetic | 110 | 449 | 88 | 81.9 | 38.6 | 463 | 578 | 81.2 | 65.8 | 26.3 |
| 71 | 72 | Helianthus | 14 | 360 | 41.7 | 40.4 | 40.8 | 374 | 503 | 19.4 | 18.8 | 21.3 |
| | | annuus | | | | | | | | | | |
| 73 | 74 | Synthetic | 14 | 360 | 41.7 | 40.4 | 40.8 | 374 | 503 | 19.4 | 18.8 | 21.3 |
| 75 | 76 | Pectobacterium | 5 | 350 | 36.5 | 35.9 | 93.1 | 362 | 478 | 21 | 23.5 | 84.6 |
| | | wasabiae | | | | | | | | | | |
| 77 | 78 | Zymomonas | 9 | 347 | 38.4 | 38.6 | 39.8 | 359 | 474 | 26.3 | 24.6 | 26.5 |
| | | mobilis | | | | | | | | | | |
| 79 | 80 | Photobacterium | 5 | 350 | 36.9 | 36.2 | 82.7 | 362 | 479 | 25 | 19.8 | 67.8 |
| | | profundum | | | | | | | | | | |
| 81 | 82 | Arabidopsis | 1 | 327 | 27.1 | 26.1 | 28.4 | 341 | 471 | 22.4 | 19.3 | 24.8 |
| | | thaliana | | | | | | | | | | |
| 83 | 84 | Arabidopsis | 116 | 469 | 49.3 | 48.7 | 33.9 | 486 | 595 | 32.2 | 32.2 | 29.9 |
| | | thaliana | | | | | | | | | | |
| 85 | 86 | Escherichia | 1 | 345 | 44.5 | 43.4 | 41.3 | 355 | 469 | 23.7 | 25.8 | 25 |
| | | coli | | | | | | | | | | |
| 87 | 88 | Escherichia | 5 | 350 | 37.4 | 36.2 | 100 | 362 | 478 | 22.7 | 24.2 | 100 |
| | | coli | | | | | | | | | | |
| 89 | 90 | Synthetic | 5 | 350 | 37.4 | 36.2 | 100 | 362 | 478 | 22.7 | 24.2 | 100 |
| 91 | 92 | Escherichia | 5 | 350 | 37.4 | 36.2 | 99.7 | 362 | 478 | 22.7 | 24.2 | 100 |
| | | coli B185 | | | | | | | | | | |
| 93 | 94 | Escherichia | 5 | 350 | 37.4 | 36.5 | 99.4 | 362 | 478 | 22.7 | 24.2 | 100 |
| | | coli 2362-75 | | | | | | | | | | |
| 95 | 96 | Photorhabdus | 5 | 350 | 35.7 | 36.5 | 90.8 | 362 | 478 | 22.7 | 22.5 | 76.9 |
| | | luminescens | | | | | | | | | | |
| | | subsp. | | | | | | | | | | |
| | | laumondii | | | | | | | | | | |
| | | TTO1 | | | | | | | | | | |
| 97 | 98 | Photorhabdus | 5 | 350 | 35.4 | 35.9 | 89.6 | 362 | 478 | 22.7 | 23.5 | 76.1 |
| | | asymbiotica | | | | | | | | | | |
| | | subsp. | | | | | | | | | | |
| | | asymbiotica | | | | | | | | | | |
| | | ATCC 43949 | | | | | | | | | | |
| 99 | 100 | Actinobacillus | 5 | 350 | 37.2 | 37.1 | 85.8 | 362 | 476 | 24.2 | 24.4 | 65 |
| | | succinogenes | | | | | | | | | | |
| | | 130Z | | | | | | | | | | |

% Identity = the percent amino acid sequence identity of the Pfam domain of each pyruvate kinase to the corresponding Pfam domain of the pyruvate kinases as shown in SEQ ID NO: 2, 10, and 88.

[0227] As provided in Table 6, some pyruvate kinases or polypeptides having pyruvate kinase activity comprise both Pfam:PF00224 pyruvate kinase barrel domain and Pfam:PF02887 pyruvate kinase alpha/beta domain having significant sequence identity to those domains found in the pyruvate kinases as shown in SEQ ID NO: 2, 4, 6, 8, 10, 12, 14, 88, or 90. Accordingly, in other embodiments, the pyruvate kinases or the polypeptides having pyruvate kinase activity suitable for the present invention may comprise a Pfam:PF00224 pyruvate kinase barrel domain and a Pfam:PF02887 pyruvate kinase alpha/beta domain, wherein the Pfam:PF00224 pyruvate kinase barrel domain has at least 80%, preferably 85%, 90%, 91%, 92%, 93%, 94%, 95%, 96%, 97%, 98%, or 99% identity to the amino acid residues 109 to 449 of SEQ ID NO: 2, the amino acid residues 98 to 439 of SEQ ID NO: 10, or the amino acid residues 5 to 350 of SEQ ID NO: 88, and wherein the Pfam:PF02887 pyruvate kinase alpha/beta domain has at least 80%, preferably 85%, 90%, 91%, 92%, 93%, 94%, 95%, 96%, 97%, 98%, or 99% identity to the amino acid residues 462 to 578 of SEQ ID NO: 2, the amino acid residues 452 to 566 of SEQ ID NO: 10, or the amino acid residues 362 to 478 of SEQ ID NO: 88.

[0228] The pyruvate kinases or the polypeptides having pyruvate kinase activity suitable for the present invention may comprise consensus sequence(s) in the Pfam:PF00224 pyruvate kinase barrel domain and the Pfam:PF02887 pyruvate kinase alpha/beta domain. For example, as shown in FIGS. 1-3, the pyruvate kinases or the polypeptides having pyruvate kinase activity disclosed herein all comprise a consensus sequence having the amino acid sequence of G-x(2)-G-x-[DEQ]-x-[GLP]-x-[EP]-x-[ILV]-x(3)-Q-x(21,22)-S-M-x(3)-[LP]-x-P-T-R-A-E-[AV]-x-D-[IV]-[AS]-x-A-[IV]-x-[DEQ]-x-[AST]-D-[ACG]-[ILV]-[LM]-L-[GS]-[AG]-E-[ST]-[AL]-x-G-x-[FWY]-P-x(2)-[AT]-[AILV]-x(2)-[LMV]-x(2)-[IV]-[ACS]-x(3)-[DE] (SEQ ID NO: 102) in the Pfam:PF00224 pyruvate kinase barrel domain and a consensus sequence having the amino acid sequence of T-x-[DGST]-G-x(6,9)-R-x(3)-[GPT]-x(3)-[FILV] (SEQ ID NO: 103) in the Pfam:PF02887 pyruvate kinase alpha/beta domain. Likewise, as shown in Table 7 below, the pyruvate kinases or the polypeptides having pyruvate kinase activity disclosed herein also comprise a conserved PK active site having the amino acid sequence of [LIVAC]-x-[LIVM]-[LIVM]-[SAPCV]-K-[LIV]-E-[NKRST]-x-[DEQHS]-[GSTA]-[LIVM] (SEQ ID NO: 101). Accordingly, in further embodiments, the pyruvate kinases or the polypeptides having pyruvate kinase activity suitable for the present invention may comprise an amino acid sequence having at least 60%, preferably, 65%, 70%, 75%, 80%, 85%, 90%, 91%, 92%, 93%, 94%, 95%, 96%, 97%, 98%, or 99% identity to the amino acid sequence of SEQ ID NO: 2, 4, 6, 8, 10, 12, 14, 88, or 90, wherein the amino acid sequence further comprises the amino acid sequence of SEQ ID NO: 102 and 103. In yet further embodiments, the pyruvate kinases or the polypeptides having pyruvate kinase activity suitable for the present invention may further comprise the conserved PK active site.

TABLE 7
Identification of PK active site in the amino acid sequences of pyruvate kinases.

| PK Gene | | | | | |
|---|---|---|---|---|---|
| SEQ ID NO | | | PK Active Domain | | Best Matches |
| Nucleic | Amino | | Domain | Domain | (Fuzzpro, max 4 |
| Acid | Acid | Organism | Start | End | mismatches allowed) |
| 1 | 2 | Arabidopsis | 320 | 332 | Fits with 0 mismatches |
| | | thaliana | | | |
| 3 | 4 | Arabidopsis | 257 | 269 | Fits with 0 mismatches |
| | | thaliana | | | |
| 5 | 6 | Arabidopsis | 394 | 406 | Fits with 0 mismatches |
| | | thaliana | | | |
| 7 | 8 | Synthetic | 320 | 332 | Fits with 0 mismatches |
| 9 | 10 | Arabidopsis | 309 | 321 | Fits with 0 mismatches |
| | | thaliana | | | |
| 11 | 12 | Arabidopsis | 254 | 266 | Fits with 0 mismatches |
| | | thaliana | | | |
| 13 | 14 | Synthetic | 309 | 321 | Fits with 0 mismatches |
| 15 | 16 | Linum | 306 | 318 | Fits with 0 mismatches |
| | | usitatissimum | | | |
| 17 | 18 | Synthetic | 306 | 318 | Fits with 0 mismatches |
| 19 | 20 | Arabidopsis | 320 | 332 | Fits with 0 mismatches |
| | | thaliana | | | |
| 21 | 22 | Arabidopsis | 320 | 332 | Fits with 0 mismatches |
| | | thaliana | | | |
| 23 | 24 | Arabidopsis | 320 | 332 | Fits with 0 mismatches |
| | | thaliana | | | |
| 25 | 26 | Synthetic | 320 | 332 | Fits with 0 mismatches |
| 27 | 28 | Brassica napus | 320 | 332 | Fits with 0 mismatches |
| 29 | 30 | Brassica napus | 320 | 332 | Fits with 0 mismatches |
| 31 | 32 | Ricinus communis | 321 | 333 | Fits with 0 mismatches |
| 33 | 34 | Vitis vinifera | 318 | 330 | Fits with 0 mismatches |
| 35 | 36 | Vitis vinifera | 317 | 329 | Fits with 0 mismatches |
| 37 | 38 | Populus | 323 | 335 | Fits with 0 mismatches |
| | | trichocarpa | | | |
| 39 | 40 | Vitis vinifera | 321 | 333 | Fits with 0 mismatches |
| 41 | 42 | Glycine max | 318 | 330 | Fits with 0 mismatches |
| 43 | 44 | Glycine max | 316 | 328 | Fits with 0 mismatches |
| 45 | 46 | Glycine max | 316 | 328 | Fits with 0 mismatches |
| 47 | 48 | Glycine max | 318 | 330 | Fits with 0 mismatches |
| 49 | 50 | Glycine max | 316 | 328 | Fits with 0 mismatches |
| 51 | 52 | Glycine max | 316 | 328 | Fits with 0 mismatches |
| 53 | 54 | Glycine max | 316 | 328 | Fits with 0 mismatches |
| 55 | 56 | Arabidopsis | 305 | 317 | Fits with 0 mismatches |
| | | thaliana | | | |
| 57 | 58 | Arabidopsis lyrata | 308 | 320 | Fits with 0 mismatches |
| | | subsp. lyrata | | | |
| 59 | 60 | Brassica napus | 310 | 322 | Fits with 0 mismatches |
| 61 | 62 | Zea mays | 291 | 303 | Fits with 0 mismatches |
| 63 | 64 | Helianthus annuus | 316 | 328 | Fits with 0 mismatches |
| 65 | 66 | Synthetic | 316 | 328 | Fits with 0 mismatches |
| 67 | 68 | Helianthus annuus | 321 | 333 | Fits with 0 mismatches |
| 69 | 70 | Synthetic | 321 | 333 | Fits with 0 mismatches |
| 71 | 72 | Helianthus annuus | 230 | 242 | Fits with 0 mismatches |
| 73 | 74 | Synthetic | 230 | 242 | Fits with 0 mismatches |
| 75 | 76 | Pectobacterium | 218 | 230 | Fits with 0 mismatches |
| | | wasabiae | | | |
| 77 | 78 | Zymomonas mobilis | 217 | 229 | Fits with 1 mismatches |
| 79 | 80 | Photobacterium | 218 | 230 | Fits with 0 mismatches |
| | | profundum | | | |
| 81 | 82 | Arabidopsis | 198 | 210 | Fits with 2 mismatches |
| | | thaliana | | | |
| 83 | 84 | Arabidopsis | 339 | 351 | Fits with 0 mismatches |
| | | thaliana | | | |
| 85 | 86 | Escherichia coli | 215 | 227 | Fits with 0 mismatches |
| 87 | 88 | Escherichia coli | 218 | 230 | Fits with 0 mismatches |
| 89 | 90 | Synthetic | 218 | 230 | Fits with 0 mismatches |
| 91 | 92 | Escherichia coli | 218 | 230 | Fits with 0 mismatches |
| | | B185 | | | |
| 93 | 94 | Escherichia coli | 218 | 230 | Fits with 0 mismatches |
| | | 2362-75 | | | |
| 95 | 96 | Photorhabdus | 218 | 230 | Fits with 1 mismatches |
| | | luminescens subsp. | | | |
| | | laumondii TTO1 | | | |
| 97 | 98 | Photorhabdus | 218 | 230 | Fits with 1 mismatches |
| | | asymbiotica subsp. | | | |
| | | asymbiotica ATCC | | | |
| | | 43949 | | | |
| 99 | 100 | Actinobacillus | 218 | 230 | Fits with 0 mismatches |
| | | succinogenes 130Z | | | |

[0229] As used herein, “functional variants” or “functional equivalent” of a molecule (e.g., a polypeptide or nucleic acid molecule) is intended to mean a molecule having substantially similar sequence as compared to the non-variant molecule while retaining the activity of the non-variant molecule in whole or in part.

[0230] For nucleotide sequences comprising an open reading frame, functional variants include those sequences that, because of the degeneracy of the genetic code, encode the identical amino acid sequence of the native protein. Naturally occurring allelic variants can be identified with the use of well-known molecular biology techniques, such as, for example, with polymerase chain reaction (PCR) and hybridization techniques. Functional variant nucleotide sequences also include synthetically derived nucleotide sequences, such as those generated, for example, by using site-directed mutagenesis and for open reading frames, encode the native protein, as well as those that encode a polypeptide having amino acid substitutions relative to the native protein. A variant nucleotide sequence may also contain insertions, deletions, or substitutions of one or more nucleotides relative to the nucleotide sequence found in nature. Accordingly, a variant protein may contain insertions, deletions, or substitutions of one or more amino acid residues relative the amino acid sequence found in nature. Generally, variants of the polynucleotide sequence of SEQ ID NO: 1, 3, 5, 7, 9, 11, 13, 15, 17, 19, 21, 23, 25, 27, 29, 31, 33, 35, 37, 39, 41, 43, 45, 47, 49, 51, 53, 55, 57, 59, 61, 63, 65, 67, 69, 71, 73, 75, 77, 79, 81, 83, 85, 87, 89, 91, 93, 95, 97, or 99, or the amino acid sequence of SEQ ID NO: 2, 4, 6, 8, 10, 12, 14, 16, 18, 20, 22, 24, 26, 28, 30, 32, 34, 36, 38, 40, 42, 44, 46, 48, 50, 52, 54, 56, 58, 60, 62, 64, 66, 68, 70, 72, 74, 76, 78, 80, 82, 84, 86, 88, 90, 92, 94, 96, 98, or 100, will have at least 60%, preferably 70%, 75%, 80%, 85%, 90%, 95%, 96%, 97%, 98%, 99%, 99.1%, 99.2%, 99.3%, 99.4%, 99.5%, 99.6%, 99.7%, 99.8%, or 99.9% sequence identity to the corresponding nucleotide or amino acid sequence. The functional variants of the polynucleotide sequence of SEQ ID NO: 1, 3, 5, 7, 9, 11, 13, 15, 17, 19, 21, 23, 25, 27, 29, 31, 33, 35, 37, 39, 41, 43, 45, 47, 49, 51, 53, 55, 57, 59, 61, 63, 65, 67, 69, 71, 73, 75, 77, 79, 81, 83, 85, 87, 89, 91, 93, 95, 97, or 99 may be variants of the corresponding wild-type polynucleotide sequence, provided that they encode a polypeptide retaining the activity of the polypeptide encoded by the polynucleotide sequence of SEQ ID NO: 1, 3, 5, 7, 9, 11, 13, 15, 17, 19, 21, 23, 25, 27, 29, 31, 33, 35, 37, 39, 41, 43, 45, 47, 49, 51, 53, 55, 57, 59, 61, 63, 65, 67, 69, 71, 73, 75, 77, 79, 81, 83, 85, 87, 89, 91, 93, 95, 97, or 99 in conferring increased content in one or more of protein, oil, or one or more amino acids in a plant, plant cell, or plant part relative to a corresponding wild-type plant, plant cell, or plant part. In some embodiments, such functional variants are capable of conferring increased content in protein and one or more amino acids in a plant, plant cell, or plant part relative to a corresponding wild-type plant, plant cell, or plant part. In another embodiment, such functional variants are capable of conferring increased content in oil and one or more amino acids in a plant, plant cell, or plant part relative to a corresponding wild-type plant, plant cell, or plant part. In other embodiment, such functional variants are capable of conferring increased content in protein, oil and one or more amino acids in a plant, plant cell, or plant part relative to a corresponding wild-type plant, plant cell, or plant part.

[0231] Likewise, the functional variants of the amino acid sequence of SEQ ID NO: 2, 4, 6, 8, 10, 12, 14, 16, 18, 20, 22, 24, 26, 28, 30, 32, 34, 36, 38, 40, 42, 44, 46, 48, 50, 52, 54, 56, 58, 60, 62, 64, 66, 68, 70, 72, 74, 76, 78, 80, 82, 84, 86, 88, 90, 92, 94, 96, 98, or 100 may be variants of the corresponding wild-type amino acid sequence, provided that they retain the activity of the protein having the amino acid sequence of SEQ ID NO: 2, 4, 6, 8, 10, 12, 14, 16, 18, 20, 22, 24, 26, 28, 30, 32, 34, 36, 38, 40, 42, 44, 46, 48, 50, 52, 54, 56, 58, 60, 62, 64, 66, 68, 70, 72, 74, 76, 78, 80, 82, 84, 86, 88, 90, 92, 94, 96, 98, or 100 in conferring increased content in one or more of protein, oil, or one or more amino acids in a plant, plant cell, or plant part relative to a corresponding wild-type plant, plant cell, or plant part. In some embodiments, such functional variants are capable of conferring increased content in protein and one or more amino acids in a plant, plant cell, or plant part relative to a corresponding wild-type plant, plant cell, or plant part. In another embodiment, such functional variants are capable of conferring increased content in oil and one or more amino acids in a plant, plant cell, or plant part relative to a corresponding wild-type plant, plant cell, or plant part. In other embodiment, such functional variants are capable of conferring increased content in protein, oil and one or more amino acids in a plant, plant cell, or plant part relative to a corresponding wild-type plant, plant cell, or plant part. Preferably, the functional variants of the amino acid sequence of SEQ ID NO: 2, 4, 6, 8, 10, 12, 14, 16, 18, 20, 22, 24, 26, 28, 30, 32, 34, 36, 38, 40, 42, 44, 46, 48, 50, 52, 54, 56, 58, 60, 62, 64, 66, 68, 70, 72, 74, 76, 78, 80, 82, 84, 86, 88, 90, 92, 94, 96, 98, or 100 also comprise one or more of the aforementioned conserved PK active site, the Pfam:PF00224 pyruvate kinase barrel domain (and/or the consensus sequence of SEQ ID NO: 102), and/or the Pfam:PF02887 pyruvate kinase alpha/beta domain (and/or the consensus sequence of SEQ ID NO: 103). Methods for analyzing an amino acid sequence and identifying functional domain(s) contained therein are known in the art. For example, HMMER algorithm (Durbin et al., “Biological sequence analysis: probabilistic models of proteins and nucleic acids,” Cambridge University Press, 1998; Eddy S., Bioinformatics, 1998, 14(9): 755-763; Schultz et al., Proc. Natl. Acad. Sci. USA, 1998, 95(11): 5857-5864) against the PFAM (comprehensive database of conserved protein family) database may be used to predict domain profile of a particular amino acid sequence. The PFAM database (Film et al. Nucleic Acids Research, 2006, Database Issue 34: D247-D251) compiles a large collection of multiple sequence alignments and hidden Markov models (HMM) covering many common protein domains and families and is available through the Sanger Institute in the United Kingdom (Bateman et al., Nucleic Acids Research, 2002, 30(1): 276-280). Tools useful in searching such databases are known in the art, for example INTERPRO (European Bioinformatics institute, UK) which allows searching several protein domain databases simultaneously. The amino acid positions of two Pfam domains in the sequences of various pyruvate kinases are provided in Table 1 above.

[0232] Moreover, in addition to the polypeptide having pyruvate kinases activity shown in SEQ ID NO: 2, 4, 6, 8, 10, 12, 14, 16, 18, 20, 22, 24, 26, 28, 30, 32, 34, 36, 38, 40, 42, 44, 46, 48, 50, 52, 54, 56, 58, 60, 62, 64, 66, 68, 70, 72, 74, 76, 78, 80, 82, 84, 86, 88, 90, 92, 94, 96, 98, or 100, which is encoded by the polynucleotide sequence of SEQ ID NO: 1, 3, 5, 7, 9, 11, 13, 15, 17, 19, 21, 23, 25, 27, 29, 31, 33, 35, 37, 39, 41, 43, 45, 47, 49, 51, 53, 55, 57, 59, 61, 63, 65, 67, 69, 71, 73, 75, 77, 79, 81, 83, 85, 87, 89, 91, 93, 95, 97, or 99, respectively, the skilled worker will recognize that DNA sequence polymorphisms which lead to changes in the amino acid sequence of SEQ ID NO: 2, 4, 6, 8, 10, 12, 14, 16, 18, 20, 22, 24, 26, 28, 30, 32, 34, 36, 38, 40, 42, 44, 46, 48, 50, 52, 54, 56, 58, 60, 62, 64, 66, 68, 70, 72, 74, 76, 78, 80, 82, 84, 86, 88, 90, 92, 94, 96, 98, or 100 may exist naturally within a population. These genetic polymorphisms in the polynucleotide sequence of SEQ ID NO: 1, 3, 5, 7, 9, 11, 13, 15, 17, 19, 21, 23, 25, 27, 29, 31, 33, 35, 37, 39, 41, 43, 45, 47, 49, 51, 53, 55, 57, 59, 61, 63, 65, 67, 69, 71, 73, 75, 77, 79, 81, 83, 85, 87, 89, 91, 93, 95, 97, or 99 may exist between individuals within a population owing to natural variation. These natural variants usually bring about a variance of 1 to 5% in the polynucleotide sequence of SEQ ID NO: 1, 3, 5, 7, 9, 11, 13, 15, 17, 19, 21, 23, 25, 27, 29, 31, 33, 35, 37, 39, 41, 43, 45, 47, 49, 51, 53, 55, 57, 59, 61, 63, 65, 67, 69, 71, 73, 75, 77, 79, 81, 83, 85, 87, 89, 91, 93, 95, 97, or 99. Each and every one of these nucleotide variations and resulting amino acid polymorphisms in the amino acid sequence of SEQ ID NO: 2, 4, 6, 8, 10, 12, 14, 16, 18, 20, 22, 24, 26, 28, 30, 32, 34, 36, 38, 40, 42, 44, 46, 48, 50, 52, 54, 56, 58, 60, 62, 64, 66, 68, 70, 72, 74, 76, 78, 80, 82, 84, 86, 88, 90, 92, 94, 96, 98, or 100, which are the result of natural variation and do not modify the functional activity, are also encompassed by the invention.

[0233] As used herein, “sequence identity” or “identity” refers to a relationship between two or more polynucleotide or polypeptide sequences, as determined by aligning the sequences for maximum correspondence over a specified comparison window. As used in the art, “identity” also means the degree of sequence relatedness between polynucleotide or polypeptide sequences as determined by the match between strings of such sequences.

[0234] “Percent identity” (% identity) or “percent sequence identity” (% sequence identity) as used herein refers to the value determined by comparing two optimally aligned sequences over a specified comparison window.

[0235] The percent identity of protein sequences as shown in Tables 1, 2, and 4 was determined by pairwise alignment of the sequences over in each case the entire sequence length, using the algorithm of Needleman and Wunsch, as implemented in the European Molecular Biology Open Software Suite (EMBOSS), version 6.3.1.2 (Trends in Genetics, 2000, 16(6): 276). Parameters used were Matrix=EBLOSUM62; gapopen=10.0; gapextend=2.0.

[0236] Multiple protein alignments as shown in the Figures and derived dendograms were produced by using the clustal algorithm as implemented in AlignX (version 31 Jul. 2006), a component of the Vector NTI Advance 10.3.0 software package of the Invitrogen Corporation. Parameters used for multiple alignments were default parameters, using gap opening penalty=10; gap extension penalty=0.05; gap separation penalty range=8; matrix=blosum62. The clustal algorithm is publicly available from various sources, e.g., from the ftp server of the European Bioinformatics Institute (EBI) (see website at ebi.ac.uk/pub/software).

[0237] For identification of domains in the sequences of this application, as shown in Table 6, the PFAM-A database release 25.0 was used, which is publicly available (e.g., see website at pfam.sanger.ac.uk). Domains were identified by using the hmmscan algorithm. This algorithm is part of the HMMER3 software package and is publicly available (e.g., from the Howard Hughes Medical Institute, Janelia Farm Research Campus, see website at hmmer.org). Parameters for the hmmscan algorithm were default parameters as implemented in hmmscan (HMMER release 3.0). Domains were scored to be present in a given sequence when the reported E-value was 0.1 or lower and if at least 80% of the length of the PFAM domain model was covered in the algorithm-produced alignment.

[0238] Sequence alignments and calculation of percent sequence identity may also be performed with CLUSTAL (see website at ebi.ac.uk/Tools/clustalw2/index.html), the program PileUp (Feng et al., J. Mol. Evolution., 1987, 25: 351-360; Higgins et al., CABIOS, 1989, 5: 151-153), or the programs Gap and BestFit (Needleman and Wunsch, J. Mol. Biol., 1970, 48: 443-453; Smith and Waterman, Adv. Appl. Math., 1981, 2: 482-489), which are part of the GCG software packet (Gentics Computer Group, 575 Science Drive, Madison, Wis.).

[0239] Other methods of sequence alignment for comparison and calculation of percent sequence identity are well known in the art. For example, the percent sequence identity may be determined with the Vector NTI Advance 10.3.0 (PC) software package (Invitrogen, 1600 Faraday Ave., Carlsbad, Calif. 92008). For percent identity calculated with Vector NTI, a gap opening penalty of 15 and a gap extension penalty of 6.66 are used for determining the percent identity of two nucleic acids. A gap opening penalty of 10 and a gap extension penalty of 0.1 are used for determining the percent identity of two polypeptides. All other parameters are set at the default settings. For purposes of a multiple alignment (e.g., Clustal W algorithm), the gap opening penalty is 10, and the gap extension penalty is 0.05 with blosum62 matrix. It is to be understood that for the purposes of determining sequence identity when comparing a DNA sequence to an RNA sequence, a thymidine nucleotide is equivalent to a uracil nucleotide. Sequence alignments and calculation of percent sequence identity may also be performed with CLUSTAL (see website at ebi.ac.uk/Tools/clustalw2/index.html), the program PileUp (Feng et al., J. Mol. Evolution., 1987, 25: 351-360; Higgins et al., CABIOS, 1989, 5: 151-153), or the programs Gap and BestFit (Needleman and Wunsch, J. Mol. Biol., 1970, 48: 443-453; Smith and Waterman, Adv. Appl. Math., 1981, 2: 482-489), which are part of the GCG software packet (Gentics Computer Group, 575 Science Drive, Madison, Wis.).

[0240] Methods of identifying homologous sequences with sequence similarity to a reference sequence are known in the art. For example, software for performing BLAST analyses for identification of homologous sequences is publicly available through the National Center for Biotechnology Information (see website at ncbi.nlm.nih.gov). PSI-BLAST (in BLAST 2.0) can also be used to perform an iterated search that detects distant relationships between molecules. When utilizing BLAST or PSI-BLAST, the default parameters of the respective programs (e.g., BLASTN for nucleotide sequences, BLASTX for proteins) can be used (see ncbi.nlm.nih.gov website). Alignment may also be performed manually by inspection. These methods may be used, for example, to identify homologs or variants of the amino acid sequence of SEQ ID NO: 2, 4, 6, 8, 10, 12, 14, 16, 18, 20, 22, 24, 26, 28, 30, 32, 34, 36, 38, 40, 42, 44, 46, 48, 50, 52, 54, 56, 58, 60, 62, 64, 66, 68, 70, 72, 74, 76, 78, 80, 82, 84, 86, 88, 90, 92, 94, 96, 98, or 100, and/or the corresponding coding nucleotide sequences for the use in the expression cassettes of the invention.

[0241] Nucleic acid molecules encoding functional variants, homologs, analogs, and orthologs of polypeptides can be isolated. The polynucleotides encoding the respective polypeptides or primers based thereon can be used as hybridization probes according to standard hybridization techniques under stringent hybridization conditions. As used herein with regard to hybridization for DNA to a DNA blot, the term “stringent conditions” refers to hybridization overnight at 60° C. in 10×Denhart's solution, 6×SSC, 0.5% SDS, and 100 μg/ml denatured salmon sperm DNA. Blots are washed sequentially at 62° C. for 30 minutes each time in 3×SSC/0.1% SDS, followed by 1×SSC/0.1% SDS, and finally 0.1×SSC/0.1% SDS. As also used herein, in a preferred embodiment, the phrase “stringent conditions” refers to hybridization in a 6×SSC solution at 65° C. In another embodiment, “highly stringent conditions” refers to hybridization overnight at 65° C. in 10×Denhart's solution, 6×SSC, 0.5% SDS and 100 μg/ml denatured salmon sperm DNA. Blots are washed sequentially at 65° C. for 30 minutes each time in 3×SSC/0.1% SDS, followed by 1×SSC/0.1% SDS, and finally 0.1×SSC/0.1% SDS. Methods for performing nucleic acid hybridizations are well known in the art.

[0242] The term “homolog(s)” is a generic term used in the art to indicate a polynucleotide or polypeptide sequence possessing a high degree of sequence relatedness to a reference sequence. Such relatedness may be quantified by determining the degree of identity and/or similarity between the two sequences. Falling within this generic term are the terms “ortholog(s)” and “paralog(s).” The term “ortholog(s)” refers to a homologous polynucleotide or polypeptide in different organisms due to ancestral relationship of these genes. The term “paralog(s)” refers to a homologous polynucleotide or polypeptide that results from one or more gene duplications within the genome of a species. The orthologs, paralogs or homologs of the protein having the amino acid sequence of SEQ ID NO: 2, 4, 6, 8, 10, 12, 14, 16, 18, 20, 22, 24, 26, 28, 30, 32, 34, 36, 38, 40, 42, 44, 46, 48, 50, 52, 54, 56, 58, 60, 62, 64, 66, 68, 70, 72, 74, 76, 78, 80, 82, 84, 86, 88, 90, 92, 94, 96, 98, or 100 may be identified or isolated from the genome of any desired organism, preferably from another plant, according to well known techniques based on their sequence similarity to the open reading frame having the polynucleotide sequence of SEQ ID NO: 1, 3, 5, 7, 9, 11, 13, 15, 17, 19, 21, 23, 25, 27, 29, 31, 33, 35, 37, 39, 41, 43, 45, 47, 49, 51, 53, 55, 57, 59, 61, 63, 65, 67, 69, 71, 73, 75, 77, 79, 81, 83, 85, 87, 89, 91, 93, 95, 97, or 99, respectively, e.g., hybridization, PCR, or computer generated sequence comparisons. For example, all or a portion of a particular open reading frame can be used as a probe that selectively hybridizes to other gene sequences present in a population of cloned genomic DNA fragments (i.e. genomic libraries) from a chosen source organism. Further, suitable genomic libraries may be prepared from any cell or tissue of an organism. Such techniques include hybridization screening of plated DNA libraries (either plaques or colonies; see, e.g., Sambrook, 1989, Molecular Cloning: A Laboratory Manual, 2^{nd} ed., Cold Spring Harbor Laboratory, Cold Spring Harbor Laboratory Press, Cold Spring Harbor, N.Y.) and amplification by PCR using oligonucleotide primers preferably corresponding to sequence domains conserved among related polypeptides or subsequences of the nucleotide sequences provided herein. These methods are known and particularly well suited to the isolation of gene sequences from organisms closely related to the organism from which the probe sequence is derived. The application of these methods using all or a portion of an open reading frame encoding a polypeptide having pyruvate kinase activity as probes is well suited for the isolation of gene sequences from any source organism, preferably other plant species. In a PCR approach, oligonucleotide primers can be designed for use in PCR reactions to amplify corresponding DNA sequences from cDNA or genomic DNA extracted from any plant of interest. Methods for designing PCR primers and PCR cloning are known in the art.

[0243] Suitable oligonucleotides for use as primers in probing or amplification reactions as the PCR reaction described above, may be about 30 or fewer nucleotides in length (e.g., 9, 12, 15, 18, 20, 21, 22, 23, or 24, or any number between 9 and 30). Generally, specific primers are upwards of 14 nucleotides in length. For optimum specificity and cost effectiveness, primers of 16 to 24 nucleotides in length are preferred. Those skilled in the art are well versed in the design of primers for use in processes such as PCR. If required, probing can be done with entire restriction fragments of the genes disclosed herein which may be 100's or even 1000's of nucleotides in length.

[0244] Accordingly, in some preferred embodiments, the nucleic acid molecule encoding a polypeptide having pyruvate kinase activity to be included in the expression cassettes of the invention comprises a polynucleotide sequence selected from the group consisting of:

[0245] (a) the polynucleotide sequence of SEQ ID NO: 1, 3, 5, 7, 9, 11 or 13;

[0246] (b) a nucleotide sequence encoding the amino acid sequence of SEQ ID NO: 2, 4, 6, 8, 10, 12 or 14;

[0247] (c) a nucleotide sequence having at least 60% identity to the nucleotide sequence of SEQ ID NO: 1, 3, 5, 7, 9, 11 or 13 and encoding a polypeptide having a Pfam:PF00224 pyruvate kinase barrel domain and a Pfam:PF02887 pyruvate kinase alpha/beta domain;

[0248] (d) a nucleotide sequence encoding an amino acid sequence having at least 60% identity to the amino acid sequence of SEQ ID NO: 2, 4, 6, 8, 10, 12 or 14 and having a Pfam:PF00224 pyruvate kinase barrel domain and a Pfam:PF02887 pyruvate kinase alpha/beta domain;

[0249] (e) a nucleotide sequence encoding an amino acid sequence comprising a Pfam:PF00224 pyruvate kinase barrel domain and a Pfam:PF02887 pyruvate kinase alpha/beta domain, wherein the Pfam:PF00224 pyruvate kinase barrel domain has at least 80% identity to the amino acid residues 109 to 449 of SEQ ID NO: 2 or the amino acid residues 98 to 439 of SEQ ID NO: 10, and wherein the Pfam:PF02887 pyruvate kinase alpha/beta domain has at least 80% identity to the amino acid residues 462 to 578 of SEQ ID NO: 2 or the amino acid residues 452 to 566 of SEQ ID NO: 10; and

[0250] (f) a nucleotide sequence encoding an amino acid sequence having at least 60% identity to the amino acid sequence of SEQ ID NO: 2, 4, 6, 8, 10, 12 or 14, wherein said amino acid sequence further comprises the amino acid sequence of SEQ ID NO: 102 and 103,

wherein the expression of the nucleic acid molecule in a plant, plant cell, or plant part confers increased content in one or more of protein, oil, or one or more amino acids in a plant, plant cell, or plant part relative to a corresponding wild-type plant, plant cell, or plant part.

[0251] In other preferred embodiments, the nucleic acid molecule encoding a polypeptide having pyruvate kinase activity to be included in the expression cassettes of the invention comprises a polynucleotide sequence selected from the group consisting of:

[0252] (a) the nucleotide sequence of SEQ ID NO: 87 or 89;

[0253] (b) a nucleotide sequence encoding the amino acid sequence of SEQ ID NO: 88 or 90;

[0254] (c) a nucleotide sequence having at least 75% identity to the nucleotide sequence of SEQ ID NO: 87 or 89 and encoding a polypeptide having a Pfam:PF00224 pyruvate kinase barrel domain and a Pfam:PF02887 pyruvate kinase alpha/beta domain;

[0255] (d) a nucleotide sequence encoding an amino acid sequence having at least 75% identity to the amino acid sequence of SEQ ID NO: 88 or 90 and having a Pfam:PF00224 pyruvate kinase barrel domain and a Pfam:PF02887 pyruvate kinase alpha/beta domain,

[0256] (e) a nucleotide sequence encoding an amino acid sequence comprising a Pfam:PF00224 pyruvate kinase barrel domain and a Pfam:PF02887 pyruvate kinase alpha/beta domain, wherein the Pfam:PF00224 pyruvate kinase barrel domain has at least 80% identity to the amino acid residues 5 to 350 of SEQ ID NO: 88, and wherein the Pfam:PF02887 pyruvate kinase alpha/beta domain has at least 80% identity to the amino acid residues 362 to 478 of SEQ ID NO: 88; and

[0257] (f) a nucleotide sequence encoding an amino acid sequence having at least 75% identity to the amino acid sequence of SEQ ID NO: 88 or 90, wherein said amino acid sequence further comprises the amino acid sequence of SEQ ID NO: 102 and 103,

wherein the expression of the nucleic acid molecule in a plant, plant cell, or plant part confers increased content in one or more of protein, oil, or one or more amino acids in a plant, plant cell, or plant part relative to a corresponding wild-type plant, plant cell, or plant part.

[0258] Nucleotide sequences may be codon optimized to improve expression in heterologous host cells. Nucleotide sequences from a heterologous source are codon optimized to match the codon bias of the host. A codon consists of a set of three nucleotides; referred to as a triplet, which encodes a specific amino acid in a polypeptide chain or for the termination of translation (stop codons). The genetic code is redundant in that multiple codons specify the same amino acid, i.e., 61 codons encoding for 20 amino acids. Organisms exhibit preference for one of the several codons encoding the same amino acid, which is known as codon usage bias. The frequency of codon usage for different species has been determined and recorded in codon usage tables. Codon optimization replaces infrequently used codons present in a DNA sequence of a heterologous gene with preferred codons of the host, based on a codon usage tables. The amino acid sequence is not altered during the process. Codon optimization can be performed using gene optimization software, such as Leto 1.0 from Entelechon. Protein sequences for the genes to be codon optimized are back-translated in the program and the codon usage is selected from a list of organisms. Leto 1.0 replaces codons from the original sequence with codons that are preferred by the organism into which the sequence will be transformed. The DNA sequence output is translated and aligned to the original protein sequence to ensure that no unwanted amino acid changes were introduced. For example, the nucleotide sequence of SEQ ID NO: 7 is the codon optimized version of the nucleotide sequence of SEQ ID NO: 1 for expression of the amino acid sequence of SEQ ID NO: 8 and 2, respectively, in maize. Similarly, the nucleotide sequence of SEQ ID NO: 13 is the codon optimized version of the nucleotide sequence of SEQ ID NO: 9 for expression of the amino acid sequence of SEQ ID NO: 14 and 10, respectively, in maize. Likewise, the nucleotide sequence of SEQ ID NO: 89 is the codon optimized version of the nucleotide sequence of SEQ ID NO: 87 for expression of the amino acid sequence of SEQ ID NO: 90 and 88, respectively, in maize.

[0259] In addition to codon optimization of a sequence from a heterologous source, gene optimization entails further modifications to the DNA sequence to optimize the gene sequence for expression without altering the protein sequence. The Leto 1.0 program can also be used to remove sequences that might negatively impact gene expression, transcript stability, protein expression or protein stability, including but not limited to, transcription splice sites, DNA instability motifs, plant polyadenylation sites, secondary structure, AU-rich RNA elements, secondary ORFs, codon tandem repeats, long range repeats. This can also be done to optimize gene sequences originating from the host organism. Another component of gene optimization is to adjust the G/C content of a heterologous sequence to match the average G/C content of endogenous genes of the host.

[0260] For example, to provide plant optimized nucleic acids, the DNA sequence of a gene can be modified to: 1) comprise codons preferred by highly expressed plant genes; 2) comprise an A+T content in nucleotide base composition to that substantially found in plants; 3) form a plant initiation sequence; 4) eliminate sequences that cause destabilization, inappropriate polyadenylation, degradation and termination of RNA, or that form secondary structure hairpins or RNA splice sites; or 5) eliminate antisense open reading frames. Increased expression of nucleic acids in plants can be achieved by utilizing the distribution frequency of codon usage in plants in general or in a particular plant. Methods for optimizing nucleic acid expression in plants can be found in EP 0359472, EP 0385962, WO 91/16432, U.S. Pat. No. 5,380,831, U.S. Pat. No. 5,436,391, Perlack et al. (Proc. Natl. Acad. Sci. USA, 1991, 88: 3324-3328), and Murray et al. (Nucleic Acids Res., 1989, 17: 477-498).

[0261] Accordingly, in some other embodiments of the invention, the nucleic acid molecule encoded by the transgene is codon optimized to improve expression of the transgene in host cells. The nucleic acid sequence may be codon optimized for any host cell in which it is expressed. In one embodiment, the nucleic acid sequence is codon optimized for maize. In further embodiments, the nucleic acid sequence may also be codon optimized for other plant species including, but not limited to rice, wheat, barley, soybean, canola, rapeseed, cotton, sugarcane, or alfalfa.

[0262] 1.1.3 Trehalose-6-Phosphate Synthase (TPS) Homologs

[0263] Trehalose is the most widespread disaccharide in nature, occurring in bacteria, fungi, insects, and plants. In most cases, trehalose synthesis is a two-step process. In the first step, trehalose-6-phosphate (T6P) is synthesized from uridine diphosphate glucose (UDP-G) and glucose-6-phosphate (G6P) by trehalose-6-phosphate synthase (TPS, EC 2.4.1.15). In the second step, trehalose-6-phosphate is dephosphorylated to trehalose by T6P phosphatase (TPP).

[0264] In Arabidopsis, 21 putative trehalose biosynthesis genes are classified in three subfamilies (Class I, II and III) based on their similarity with yeast TPS and TPP genes. The Class I proteins (AtTPS1-AtTPS4) contain a TPS domain, Class II proteins (AtTPS5-AtTPS11) contain both a TPS domain and a TPP domain, and the Class III subfamily proteins are characterized by having only a TPP domain. Although the Arabidopsis Class 1 and Class III proteins have established TPS and TPP activity, respectively, the function of the Class II proteins (AtTPS5-AtTPS11) remains elusive. Heterologous expression of class II type proteins in yeast indicated that none of the encoded enzymes displayed significant TPS or TPP activity (Ramon, M. et al., Plant Cell Environ 32:1015-1032, 2009). For example, the class II AtTPS6 was shown to regulate plant architecture, shape of epidermal pavement cells, and branching of trichomes (Chary, S. N., et al., Plant Physiol 146: 97-107, 2008), indicating a role of the gene in controlling cellular morphogenesis. Many TPS homologs contain two conserved Pfam domains, the Pfam:PF00982.15 glycosyltransferase family 20 domain and the Pfam:PF02358.10 trehalose-phosphatase domain.

[0265] It is found that, by expressing certain TPS homologs in a plant, plant cell, or plant part under control of some specific types of promoters, optionally in combination with other regulatory elements and/or targeting peptides, the content of one or more of protein, oil, or one or more amino acids in such a plant, plant cell, or plant part is surprisingly increased. Accordingly, in one aspect, the invention provides an expression cassette capable of expressing a nucleic acid molecule encoding a TPS homolog in a plant, plant cell, or plant part, wherein the expression of such a nucleic acid molecule confers increased content in one or more of protein, oil, or one or more amino acids in said plant, plant cell, or plant part relative to a corresponding wild-type plant, plant cell, or plant part. Preferably, the expression of the nucleic acid molecule encoding a TPS homolog confers an increase in protein and one or more amino acids in a plant, plant cell, or plant part relative to a corresponding wild-type plant, plant cell, or plant part. In another embodiment, the expression of the nucleic acid molecule encoding a TPS homolog confers an increase in oil and one or more amino acids in a plant, plant cell, or plant part relative to a corresponding wild-type plant, plant cell, or plant part. More preferably, the expression of the nucleic acid molecule encoding a TPS homolog confers an increase in protein, oil, and one or more amino acids in a plant, plant cell, or plant part relative to a corresponding wild-type plant, plant cell, or plant part.

[0266] Preferably, the TPS homolog suitable for the present invention comprises a Pfam:PF00982.15 glycosyltransferase family 20 domain and a Pfam:PF02358.10 trehalose-phosphatase domain. Accordingly, in one embodiment, the nucleic acid molecule encoding a TPS homolog to be included in the expression cassettes of the invention comprises a polynucleotide sequence encoding a polypeptide having the amino acid sequence of SEQ ID NO: 121, 124, 146, 148, 150, 152, 154, 156, 158, 160, 162, 164 or 166, or functional variants thereof. In another embodiment, the nucleic acid molecule encoding a TPS homolog comprises the polynucleotide sequence of SEQ ID NO: 120, 122, 123, 125, 145, 147, 149, 151, 153, 155, 157, 159, 161, 163 or 165 or functional variants thereof.

[0267] The TPS homolog may also contain specific amino acid sequence motifs within each Pfam domain. For example, the PF00982.15 Pfam domain contains the amino acid sequence motifs of SEQ ID NO: 126, 127, 128, 129 and 130 and the PF02358.10 Pfam domain contains the amino acid sequence motifs of SEQ ID NO: 131, 132, 133, 134, 135, 136 and 137, as shown in FIG. 10. In a preferred embodiment, the nucleic acid molecule encoding a TPS homolog comprises a nucleotide sequence encoding a polypeptide having the amino acid sequence motifs of SEQ ID NO: 126, 127, 128, 129, 130, 131, 132, 133, 134, 135, 136 and 137.

[0268] AtTPS8 and AtTPS9 are Arabidopsis Class II trehalose-6-phosphate synthases that contain the PF00982.15 and PF02358.10 Pfam domains. AtTPS8 and AtTPS9 also contain the amino acid sequence motifs of SEQ ID NO: 126, 127, 128, 129, 130, 131, 132, 133, 134, 135, 136 and 137. In a preferred embodiment, the expression cassette of the invention contains a nucleic acid molecule encoding AtTPS8 or AtTPS9.

[0269] The percent sequence identity of several TPS homologs to AtTPS8 or AtTPS9 is shown in Table 8 below. Table 9 shows the location of the PF00982.15 and PF02358.10 Pfam domains, as well as the percent sequence identity between the Pfam domains of the TPS homologs and the Pfam domains of AtTPS8 or AtTPS9. All of the TPS homologs shown in Tables 8 and 9 contain the conserved amino acid sequence motifs of SEQ ID NO 126, 127, 128, 129, 130, 131, 132, 133, 134, 135, 136 and 137, as shown in FIG. 10.

TABLE 8
Percent amino acid sequence identity of TPS homologs to AtTPS8
(SEQ ID NO: 121) or AtTPS9 (SEQ ID NO: 124).

| | | % Identity to | % Identity to |
|---|---|---|---|
| | | AtTPS8 | AtTPS9 |
| SEQ | | (SEQ ID NO: | (SEQ ID |
| ID NO | ORGANISM | 121) | NO: 124) |
| 121 | Arabidopsis thaliana | 100 | 83.3 |
| 124 | Arabidopsis thaliana | 83.3 | 100 |
| 146 | Arabidopsis thaliana | 59.4 | 61.2 |
| 148 | Arabidopsis thaliana | 57.3 | 57.6 |
| 150 | Glycine max | 73.3 | 74.4 |
| 152 | Oryza sativa | 49.8 | 49.5 |
| 154 | Oryza sativa | 56.4 | 56.3 |
| 156 | Oryza sativa | 59.1 | 59.3 |
| 158 | Solanum tuberosum | 59.7 | 59.4 |
| 160 | Crocosphaera watsonii | 29.6 | 29.6 |
| 162 | Yarrowia lipolytica | 28.9 | 29.2 |
| 164 | Arabidopsis lyrata subsp. lyrata | 83.3 | 98.2 |
| 166 | Arabidopsis lyrata subsp. lyrata | 97.0 | 83.3 |
| 168 | Arabidopsis thaliana | 28.7 | 28.5 |
| 170 | Sorghum bicolor | 27.9 | 28.9 |
| 172 | Solanum lycopersicum | 29.1 | 29.1 |
| 174 | Triticum aestivum | 28.1 | 28.0 |
| 176 | Zostera marina | 56.0 | 56.2 |
| 178 | Zea mays | 63.5 | 63.3 |
| 180 | Zea mays | 54.8 | 54.7 |
| 182 | Zea mays | 59.2 | 58.8 |

TABLE 9
Pfam domains PF00982.15 and PF02358.10 in the amino acid sequences of TPS
homologs.

| | | PFAM Domain PF00982.15 | | | | PFAM Domain PF02358.10 | | | |
|---|---|---|---|---|---|---|---|---|---|
| | | Glycosyltransferase family 20 | | | | Trehalose-phosphatase | | | |
| | | | | % | % | | | % | % |
| | | | | Identity | Identity | | | Identity | Identity |
| SEQ | | | | to | to | | | to | to |
| ID | | Pfam | Pfam | AtTPS8 | AtTPS9 | Pfam | Pfam | AtTPS8 | AtTPS9 |
| NO | ORGANISM | Start | End | PFAM | PFAM | Start | End | PFAM | PFAM |
| 121 | Arabidopsis | 57 | 541 | 100.0 | 86.1 | 590 | 825 | 100.0 | 83.5 |
| | thaliana | | | | | | | | |
| 124 | Arabidopsis | 59 | 546 | 86.1 | 100.0 | 595 | 830 | 83.5 | 100.0 |
| | thaliana | | | | | | | | |
| 146 | Arabidopsis | 60 | 546 | 65.0 | 67.0 | 595 | 830 | 56.8 | 58.1 |
| | thaliana | | | | | | | | |
| 148 | Arabidopsis | 50 | 538 | 63.4 | 62.8 | 587 | 822 | 60.8 | 60.8 |
| | thaliana | | | | | | | | |
| 150 | Glycine max | 59 | 546 | 77.3 | 77.3 | 595 | 830 | 71.6 | 73.7 |
| 152 | Oryza sativa | 23 | 511 | 52.5 | 53.3 | 560 | 794 | 56.1 | 58.6 |
| 154 | Oryza sativa | 77 | 562 | 60.7 | 60.9 | 611 | 846 | 61.4 | 60.2 |
| 156 | Oryza sativa | 59 | 550 | 64.0 | 65.7 | 599 | 832 | 58.5 | 58.5 |
| 158 | Solanum | 61 | 546 | 63.3 | 63.1 | 595 | 830 | 62.7 | 62.7 |
| | tuberosum | | | | | | | | |
| 160 | Crocosphaera | 2 | 462 | 32.9 | 33.2 | 496 | 714 | 33.2 | 34.0 |
| | watsonii | | | | | | | | |
| 162 | Yarrowia | 22 | 514 | 27.5 | 27.7 | 546 | 782 | 36.0 | 36.1 |
| | lipolytica | | | | | | | | |
| 164 | Arabidopsis | 59 | 546 | 86.1 | 98.8 | 595 | 830 | 83.5 | 98.3 |
| | lyrata subsp. | | | | | | | | |
| | lyrata | | | | | | | | |
| 166 | Arabidopsis | 58 | 541 | 97.5 | 86.9 | 590 | 825 | 97.5 | 83.5 |
| | lyrata subsp. | | | | | | | | |
| | lyrata | | | | | | | | |
| 168 | Arabidopsis | 4 | 471 | 37.4 | 37.6 | 515 | 755 | 29.6 | 29.3 |
| | thaliana | | | | | | | | |
| 170 | Sorghum | 128 | 595 | 37.6 | 37.6 | 643 | 872 | 29.3 | 28.1 |
| | bicolor | | | | | | | | |
| 172 | Solanum | 91 | 558 | 37.6 | 37.0 | 602 | 843 | 30.2 | 29.5 |
| | lycopersicum | | | | | | | | |
| 174 | Triticum | 3 | 470 | 37.2 | 37.0 | 518 | 754 | 30.0 | 28.5 |
| | aestivum | | | | | | | | |
| 176 | Zostera | 67 | 552 | 59.9 | 59.8 | 601 | 833 | 60.2 | 58.9 |
| | marina | | | | | | | | |
| 178 | Zea mays | 58 | 544 | 66.2 | 66.0 | 593 | 829 | 65.0 | 67.1 |
| 180 | Zea mays | 80 | 582 | 60.5 | 59.7 | 631 | 865 | 60.3 | 59.9 |
| 182 | Zea mays | 59 | 546 | 62.7 | 62.3 | 595 | 830 | 63.0 | 63.6 |

% Identity = the percent sequence identity of the Pfam domain of the TPS homolog to the Pfam domain of AtTPS8 (SEQ ID NO: 121) or AtTPS9 (SEQ ID NO: 124).

[0270] As provided in Table 9, some TPS homologs comprise both a Pfam:PF00982.15 glycosyltransferase family 20 domain and a Pfam:PF02358.10 trehalose-phosphatase domain having significant sequence identity to those domains found in the TPS homologs as shown in SEQ ID NO: 121 or 124. Accordingly, in other embodiments, the TPS homologs suitable for the present invention may comprise a Pfam:PF00982.15 glycosyltransferase family 20 domain and a Pfam:PF02358.10 trehalose-phosphatase domain. In another embodiment, the TPS homologs suitable for the present invention may comprise a Pfam:PF00982.15 glycosyltransferase family 20 domain and a Pfam:PF02358.10 trehalose-phosphatase domain, wherein the Pfam:PF00982.15 glycosyltransferase family 20 domain has at least 50%, preferably 55%, 60%, 65%, 70%, 75%, 80%, 85%, 90%, 91%, 92%, 93%, 94%, 95%, 96%, 97%, 98%, or 99% identity to the amino acid residues 57 to 541 of SEQ ID NO: 121 or the amino acid residues 59 to 546 of SEQ ID NO: 124, and wherein the Pfam:PF02358.10 trehalose-phosphatase domain has at least 55%, preferably 60%, 65%, 70%, 75%, 80%, 85%, 90%, 91%, 92%, 93%, 94%, 95%, 96%, 97%, 98%, or 99% identity to the amino acid residues 590 to 825 of SEQ ID NO: 121 or the amino acid residues 595 to 830 of SEQ ID NO: 124.

[0271] In one embodiment, the TPS homologs suitable for the present invention may comprise the conserved motifs as shown in the amino acid sequence of SEQ ID NO: 126, 127, 128, 129, 130, 131, 132, 133, 134, 135, 136 and 137.

[0272] In further embodiments, the TPS homologs suitable for the present invention may comprise an amino acid sequence having at least 49%, preferably, 50%, 55%, 60%, 65%, 70%, 75%, 80%, 85%, 90%, 91%, 92%, 93%, 94%, 95%, 96%, 97%, 98%, or 99% identity to the amino acid sequence of SEQ ID NO: 121 or 124, wherein the amino acid sequence further comprises the amino acid sequence of SEQ ID NO: 126, 127, 128, 129, 130, 131, 132, 133, 134, 135, 136 and 137.

[0273] Generally, variants of the nucleotide sequence of SEQ ID NO: 120, 122, 123, 125, 145, 147, 149, 151, 153, 155, 157, 159, 161, 163 or 165 or the amino acid sequence of SEQ ID NO: 121, 124, 146, 148, 150, 152, 154, 156, 158, 160, 162, 164 or 166, will have at least 70%, preferably 75%, 80%, 85%, 90%, 95%, 96%, 97%, 98%, 99%, 99.1%, 99.2%, 99.3%, 99.4%, 99.5%, 99.6%, 99.7%, 99.8%, or 99.9% sequence identity to the corresponding nucleotide or amino acid sequence. The functional variants of the polynucleotide sequence of SEQ ID NO: 120, 122, 123, 125, 145, 147, 149, 151, 153, 155, 157, 159, 161, 163 or 165 may be variants of the corresponding wild-type polynucleotide sequence, provided that they encode a polypeptide retaining the activity of the polypeptide encoded by the polynucleotide sequence of SEQ ID NO: 120, 122, 123, 125, 145, 147, 149, 151, 153, 155, 157, 159, 161, 163 or 165 in conferring an increase content in one or more of protein, oil, or one or more amino acids in a plant, plant cell, or plant part relative to a corresponding wild-type plant, plant cell, or plant part. In some embodiments, such functional variants are capable of conferring increased content in protein and one or more amino acids in a plant, plant cell, or plant part relative to a corresponding wild-type plant, plant cell, or plant part. In other embodiments, such functional variants are capable of conferring increased content in protein, oil and one or more amino acids in a plant, plant cell, or plant part relative to a corresponding wild-type plant, plant cell, or plant part.

[0274] Likewise, the functional variants of the amino acid sequence of SEQ ID NO: 121, 124, 146, 148, 150, 152, 154, 156, 158, 160, 162, 164 or 166 may be variants of the corresponding wild-type amino acid sequences, provided that they retain the activity of the protein having the amino acid sequence of SEQ ID NO: 121, 124, 146, 148, 150, 152, 154, 156, 158, 160, 162, 164 or 166 in conferring an increase content in one or more of protein, oil, or one or more amino acids in a plant, plant cell, or plant part relative to a corresponding wild-type plant, plant cell, or plant part. In some embodiments, such functional variants are capable of conferring increased content in protein and one or more amino acids in a plant, plant cell, or plant part relative to a corresponding wild-type plant, plant cell, or plant part. In other embodiment, such functional variants are capable of conferring increased content in protein, oil and one or more amino acids in a plant, plant cell, or plant part relative to a corresponding wild-type plant, plant cell, or plant part. Moreover, in addition to the TPS homologs shown in SEQ ID NO: 120, 122, 123, 125, 145, 147, 149, 151, 153, 155, 157, 159, 161, 163 or 165, which encode the polypeptide of SEQ ID NO: 121, 124, 146, 148, 150, 152, 154, 156, 158, 160, 162, 164 or 166, respectively, the skilled worker will recognize that DNA sequence polymorphisms which lead to changes in the amino acid sequences of SEQ ID NO: 121, 124, 146, 148, 150, 152, 154, 156, 158, 160, 162, 164 or 166 may exist naturally within a population. These genetic polymorphisms in the polynucleotide sequence of SEQ ID NO: 120, 122, 123, 125, 145, 147, 149, 151, 153, 155, 157, 159, 161, 163 or 165 may exist between individuals within a population owing to natural variation. These natural variants usually bring about a variance of 1 to 5% in the nucleotide sequence of SEQ ID NO: 120, 122, 123, 125, 145, 147, 149, 151, 153, 155, 157, 159, 161, 163 or 165. Each and every one of these nucleotide variations and resulting amino acid polymorphisms in the amino acid sequences of SEQ ID NO: 121, 124, 146, 148, 150, 152, 154, 156, 158, 160, 162, 164 or 166, which are the result of natural variation and do not modify the functional activity, are to be encompassed by the invention.

[0275] In another embodiment, TPS homologs comprise a PF00982.15 Pfam domain having at least 50%, preferably 55%, 60%, 65%, 70%, 75%, 80%, 85%, 90%, 95%, 96%, 97%, 98%, 99%, 99.1%, 99.2%, 99.3%, 99.4%, 99.5%, 99.6%, 99.7%, 99.8%, or 99.9% sequence identity to amino acid residues 57 to 541 of SEQ ID NO: 121 or amino acid residues 59 to 546 of SEQ ID NO: 124, and a PF02358.10 Pfam domain having at least 50%, preferably 55%, 60%, 65%, 70%, 75%, 80%, 85%, 90%, 95%, 96%, 97%, 98%, 99%, 99.1%, 99.2%, 99.3%, 99.4%, 99.5%, 99.6%, 99.7%, 99.8%, or 99.9% sequence identity to amino acid residues 590 to 825 of SEQ ID NO: 121 or amino acid residues 595 to 830 of SEQ ID NO: 124.

[0276] The identity of protein sequences shown in Tables 8 and 9 was determined by pairwise alignment of the sequences over in each case the entire sequence length, using the algorithm of Needleman and Wunsch, as implemented in the The European Molecular Biology Open Software Suite (EMBOSS), version 6.3.1.2 (Trends in Genetics 16 (6), 276 (2000)). Parameters used were Matrix=EBLOSUM62; gapopen=10.0; gapextend=2.0.

[0277] Multiple protein alignments and derived dendograms were produced by using the clustal algorithm as implemented in AlignX (version 31 Jul. 2006), a component of the Vector NTI Advance 10.3.0 software package of the Invitrogen Corporation. Parameters used for multiple alignments were default parameters, using gap opening penalty=10; gap extension penalty=0.05; gap separation penalty range=8; matrix=blosum62. The clustal algorithm is publicly available from various sources, e.g. from the ftp server of the European Bioinformatics Institute (EBI) (ebi.ac.uk/pub/software/).

[0278] For identification of domains in the sequences of this application, the PFAM-A database release 25.0 was used, which is publicly available (e.g. from pfam.sanger.ac.uk/). Domains were identified by using the hmmscan algorithm. This algorithm is part of the HMMER3 software package and is publicly available (e.g. from the Howard Hughes Medical Institute, Janelia Farm Research Campus (hmmer.org/). Parameters for the hmmscan algorithm were default parameters as implemented in hmmscan (HMMER release 3.0). Domains were scored to be present in a given sequence when the reported E-value was 0.1 or lower and if at least 80% of the length of the PFAM domain model was covered in the algorithm-produced alignment.

[0279] Methods of identifying homologous sequences with sequence similarity to a reference sequence are known in the art. For example, software for performing BLAST analyses for identification of homologous sequences is publicly available through the National Center for Biotechnology Information (see website at ncbi.nlm.nih.gov). PSI-BLAST (in BLAST 2.0) can also be used to perform an iterated search that detects distant relationships between molecules. When utilizing BLAST or PSI-BLAST, the default parameters of the respective programs (e.g., BLASTN for nucleotide sequences, BLASTX for proteins) can be used (see ncbi.nlm.nih.gov website). Alignment may also be performed manually by inspection. These methods may be used, for example, to identify homologs or variants of the amino acid sequence of SEQ ID NO: 121, 124, 146, 148, 150, 152, 154, 156, 158, 160, 162, 164 or 166, and/or the corresponding coding nucleotide sequences for the use in the expression cassette of the invention.

[0280] In one embodiment, the nucleic acid molecule to be included in the expression cassette of the invention comprises:
[0281] (i) the nucleotide sequence of SEQ ID NO: 120, SEQ ID NO: 122, SEQ ID NO: 123 or SEQ ID NO: 125;
[0282] (ii) a nucleotide sequence encoding the amino acid sequence of SEQ ID NO: 121 or SEQ ID NO: 124;
[0283] (iii) a nucleotide sequence having at least 70% sequence identity to the nucleotide sequence of SEQ ID NO: 120, SEQ ID NO: 122, SEQ ID NO: 123 or SEQ ID NO: 125 and encoding a polypeptide having a Pfam:PF00982.15 glycosyltransferase family 20 domain and a Pfam:PF02358.10 trehalose-phosphatase domain;
[0284] (iv) a nucleotide sequence encoding an amino acid sequence having at least 80% sequence identity to the amino acid sequence of SEQ ID NO 121 or SEQ ID NO: 124 and having a Pfam:PF00982.15 glycosyltransferase family 20 domain and a Pfam:PF02358.10 trehalose-phosphatase domain;
[0285] (v) a nucleotide sequence encoding an amino acid sequence comprising a Pfam:PF00982.15 glycosyltransferase family 20 domain and a Pfam:PF02358.10 trehalose-phosphatase domain, wherein the Pfam:PF00982.15 glycosyltransferase family 20 domain has at least 50% identity to amino acid residues 57 to 541 of SEQ ID NO: 121 or the amino acid residues 59 to 546 of SEQ ID NO: 124, and wherein the Pfam:PF02358.10 trehalose-phosphatase domain has at least 55% identity to the amino acid residues 590 to 825 of SEQ ID NO: 121 or the amino acid residues 595 to 830 of SEQ ID NO: 124; or
[0286] (vi) a nucleotide sequence encoding an amino acid sequence comprising the amino acid sequence of SEQ ID NO: 126, 127, 128, 129, 130, 131, 132, 133, 134, 135, 136 and 137,
   and confers an increase in one or more of protein, oil, or one or more amino acids in a plant, plant cell, or plant part relative to a corresponding wild-type plant, plant cell, or plant part.

[0287] In another embodiment, the nucleic acid molecule to be included in the expression cassette of the invention comprises:
[0288] (i) the nucleotide sequence of SEQ ED NO: 145, 147, 149, 151, 153, 155, 157, 159, 161, 163 or 165;
[0289] (ii) a nucleotide sequence encoding the amino acid sequence of SEQ ID NO: 146, 148, 150, 152, 154, 156, 158, 160, 162, 164 or 166;
[0290] (iii) a nucleotide sequence having at least 70% sequence identity to the nucleotide sequence of SEQ ID NO: 145, 147, 149, 151, 153, 155, 157, 159, 161, 163 or 165 and encoding a polypeptide having a Pfam:PF00982.15 glycosyltransferase family 20 domain and a Pfam:PF02358.10 trehalose-phosphatase domain; or
[0291] (iv) a nucleotide sequence encoding an amino acid sequence having at least 80% sequence identity to the amino acid sequence of SEQ ID NO: 146, 148, 150, 152, 154, 156, 158, 160, 162, 164 or 166 and having a Pfam:PF00982.15 glycosyltransferase family 20 domain and a Pfam:PF02358.10 trehalose-phosphatase domain,
   and confers an increase in one or more of protein, oil, or one or more amino acids in a plant, plant cell, or plant part relative to a corresponding wild-type plant, plant cell, or plant part.

[0292] In a preferred embodiment, the nucleic acid molecule to be included in the expression cassette of the invention comprises a nucleotide sequence encoding a Class II trehalose-6-phosphate synthase. Preferably, the nucleic acid molecule to be included in the expression cassette of the invention confers an increase in protein and one or more amino acids in a plant, plant cell, or plant part relative to a corresponding wild-type plant, plant cell, or plant part. In another embodiment, the nucleic acid molecule to be included in the expression cassette of the invention confers an increase in oil and one or more amino acids in a plant, plant cell, or plant part relative to a corresponding wild-type plant, plant cell, or plant part. More preferably, the nucleic acid molecule to be included in the expression cassette of the invention confers an increase in protein, oil, and one or more amino acids in a plant, plant cell, or plant part relative to a corresponding wild-type plant, plant cell, or plant part.

[0293] In a further embodiment, the Pfam:PF00982.15 glycosyltransferase family 20 domain comprises amino acid residues 57 to 541 of SEQ ID NO: 121 or amino acid residues 59 to 546 of SEQ ID NO: 124 and the Pfam:PF02358.10 trehalose-phosphatase domain comprises amino acid residues 590 to 825 of SEQ ID NO: 121 or amino acid residues 595 to 830 of SEQ ID NO: 124.

[0294] TPS orthologs, paralogs or homologs may be identified or isolated from the genome of any desired organism, preferably from another plant, according to well known techniques based on their sequence similarity to, for example, the TPS homolog open reading frame having the polynucleotide sequence of SEQ ID NO: 120, 122, 123, 125, 145, 147, 149, 151, 153, 155, 157, 159, 161, 163 or 165, e.g., hybridization, PCR, or computer generated sequence comparisons. For example, all or a portion of a particular open reading frame can be used as a probe that selectively hybridizes to other gene sequences present in a population of cloned genomic DNA fragments (i.e. genomic libraries) from a chosen source organism. Further, suitable genomic libraries may be prepared from any cell or tissue of an organism. Such techniques include hybridization screening of plated DNA libraries (either plaques or colonies; see, e.g., Sambrook, 1989, Molecular Cloning: A Laboratory Manual, 2^{nd} ed., Cold Spring Harbor Laboratory, Cold Spring Harbor Laboratory Press, Cold Spring Harbor, N.Y.) and amplification by PCR using oligonucleotide primers preferably corresponding to sequence domains conserved among related polypeptide or subsequences of the nucleotide sequences provided herein. These methods are known and particularly well suited to the isolation of gene sequences from organisms closely related to the organism from which the probe sequence is derived. The application of these methods using all or a portion of an open reading frame of a TPS homolog as probes is well suited for the isolation of gene sequences from any source organism, preferably other plant species. In a PCR approach, oligonucleotide primers can be designed for use in PCR reactions to amplify corresponding DNA sequences from cDNA or genomic DNA extracted from any plant of interest. Methods for designing PCR primers and PCR cloning are known in the art.

[0295] A TPS homolog may also readily be identified by searching in specialized databases containing conserved protein domains such as Pfam (Finn et al. Nucleic Acids Research (2006) Database Issue 34:D247-D251). The Pfam database compiles a large collection of multiple sequence alignments and hidden Markov models (HMM) covering many common protein domains and families and is available through the Sanger Institute in the United Kingdom (Bateman et al., Nucleic Acids Research 30(1): 276-280 (2002)). Tools useful in searching such databases are well known in the art, for example INTERPRO (European Bioinformatics institute, UK) which allows searching several protein domain databases simultaneously. The amino acid positions of two Pfam domains in the sequences of various TPS homologs are provided in Table 2 above.

[0296] Nucleotide sequences may be codon optimized to improve expression in heterologous host cells. Nucleotide sequences from a heterologous source are codon optimized to match the codon bias of the host. A codon consists of a set of three nucleotides, referred to as a triplet, which encodes a specific amino acid in a polypeptide chain or for the termination of translation (stop codons). The genetic code is redundant in that multiple codons specify the same amino acid, i.e., 61 codons encoding for 20 amino acids. Organisms exhibit preference for one of the several codons encoding the same amino acid, which is known as codon usage bias. The frequency of codon usage for different species has been determined and recorded in codon usage tables. Codon optimization replaces infrequently used codons present in a DNA sequence of a heterologous gene with preferred codons of the host, based on a codon usage tables. The amino acid sequence is not altered during the process. Codon optimization can be performed using gene optimization software, such as Leto 1.0 from Entelechon. Protein sequences for the genes to be codon optimized are back-translated in the program and the codon usage is selected from a list of organisms. Leto 1.0 replaces codons from the original sequence with codons that are preferred by the organism into which the sequence will be transformed. The DNA sequence output is translated and aligned to the original protein sequence to ensure that no unwanted amino acid changes were introduced. For example, the nucleotide sequence of SEQ ID NO: 122 is the codon optimized version of the nucleotide sequence of SEQ ID NO: 120 for expression in maize. As a further example, the nucleotide sequence of SEQ ID NO: 125 is the codon optimized version of the nucleotide sequence of SEQ ID NO: 123 for expression in maize.

[0297] 1.2 Other Regulatory Elements

[0298] In addition to the promoter and the nucleic acid molecule encoding a polypeptide having pyruvate kinase activity, the expression cassettes of the present invention may further comprise other regulatory elements. The term “regulatory elements” encompasses all sequences which may influence construction or function of the expression cassette. Regulatory elements may, for example, modify transcription and/or translation of a gene in a prokaryotic or eukaryotic organism. Thus, the expression profile of the nucleic acid molecule included in the expression cassettes of the invention may be modulated depending on the combination of the transcription regulating nucleotide sequence and the other regulatory element(s) comprised in the expression cassette.

[0299] Accordingly, in one embodiment, the expression cassettes of the invention may further comprise at least one additional regulatory element selected from the group consisting of:

[0300] (a) 5′-untranslated sequences (or 5′-untranslated regions or 5′-UTR),

[0301] (b) intron sequences,

[0302] (c) transcription termination sequences (or terminators).

[0303] A variety of 5′ and 3′ transcriptional regulatory sequences are available for use in the expression cassettes of the present invention. As the DNA sequence between the transcription initiation site and the start codon of the coding sequence, i.e., the 5′-untranslated sequence, can influence gene expression, one may wish to include a particular 5′-untranslated sequence in the expression cassettes of the invention. Preferred 5′-untranslated sequences include those sequences predicted to direct optimum expression of the attached gene, i.e., consensus 5′-untranslated sequences which may increase or maintain mRNA stability and prevent inappropriate initiation of translation. The choice of such sequences will be known to those of skill in the art. Sequences obtained from genes that are highly expressed in plants will be most preferred. Also preferred is the 5′-untranslated region obtained from the same gene as the transcription regulating sequence to be included in the expression cassette of the invention.

[0304] Additionally, it is known in the art that a number of non-translated leader sequences are capable of enhancing expression, for example, leader sequences derived from viruses. For example, leader sequences from Tobacco Mosaic Virus (TMV), Maize Chlorotic Mottle Virus (MCMV), and Alfalfa Mosaic Virus (AMV) have been shown to be effective in enhancing expression (e.g., Gallie 1987; Skuzeski 1990). Other viral leader sequences known in the art include, but not limited to, Picornavirus leaders, for example, EMCV leader (Encephalomyocarditis 5′ noncoding region) (Elroy-Stein 1989), Potyvirus leaders, for example, TEV leader (Tobacco Etch Virus), MDMV leader (Maize Dwarf Mosaic Virus), Human immunoglobulin heavy-chain binding protein (BiP) leader (Macejak 1991), and untranslated leader from the coat protein mRNA of alfalfa mosaic virus (AMV RNA 4) (Jobling 1987).

[0305] The 3′ regulatory sequence preferably includes from about 50 to about 1,000, more preferably about 100 to about 1,000, base pairs and contains plant transcriptional and translational termination sequences. Transcription termination sequences, or terminators, are responsible for the termination of transcription and correct mRNA polyadenylation. Thus, the terminators preferably comprise a sequence inducing polyadenylation. The terminator may be heterologous with respect to the transcription regulating nucleotide sequence and/or the nucleic acid sequence to be expressed, but may also be the natural terminator of the gene from which the transcription regulating nucleotide sequence and/or the nucleic acid sequence to be expressed is obtained. In one embodiment, the terminator is heterologous to the transcription regulating nucleotide sequence and/or the nucleic acid sequence to be expressed. In another embodiment, the terminator is the natural terminator of the gene of the transcription regulating nucleotide sequence.

[0306] Appropriate terminators and those which are known to function in plants include, but are not limited to, CaMV 35S terminator, the tml terminator, the nopaline synthase (NOS) terminator (t-NOS) (SEQ ID NO: 115), the pea rbcS E9 terminator, the terminator for the T7 transcript from the octopine synthase (OCS) gene of Agrobacterium tumefaciens (t-OCS3) (SEQ ID NO: 116), the 3′ end of the protease inhibitor I or II genes from potato or tomato, and the TO13357 terminator from Oryza sativa (SEQ ID NO: 187). Alternatively, one also could use a gamma coixin, oleosin 3 or other terminator from the genus Coix. Preferred 3′ regulatory elements include, but are not limited to, those from the nopaline synthase (NOS) gene of Agrobacterium tumefaciens (Bevan 1983) (SEQ ID NO: 115), the terminator for the T7 transcript from the octopine synthase gene of Agrobacterium tumefaciens (SEQ ID NO: 116), and the 3′ end of the protease inhibitor I or II genes from potato or tomato. Non-limiting examples of terminators to be included in the expression cassettes of the invention may comprise the nucleotide sequence of SEQ ID NO: 115, 116, or 187.

[0307] Accordingly, in some preferred embodiments, the expression cassettes of the invention may further comprise a terminator selected from the group consisting of:

[0308] (a) a terminator comprising the nucleotide sequence of SEQ ID NO: 115, 116, or 187; and

[0309] (b) a terminator comprising a nucleotide sequence having at least 90%, preferably 95%, 96%, 97%, 98%, 99%, 99.1%, 99.2%, 99.3%, 99.4%, 99.5%, 99.6%, 99.7%, 99.8%, or 99.9% identity to the nucleotide sequence of SEQ ID NO: 115, 116, or 187.

[0310] Transcription regulatory elements can also include intron sequences that have been shown to enhance gene expression in transgenic plants, particularly in monocotyledonous plants. The intron sequence is preferably inserted in the expression cassettes of the invention between the promoter and the nucleic acid molecule to be expressed. In some preferred embodiments, such expression enhancing intron sequences are from monocotyledonous plants. In other preferred embodiments, such expression enhancing intron sequences are obtained from rice. Preferred intron sequences include, but are not limited to, intron sequences from Adh1 (Callis 1987), bronze1, actin1, actin2 (WO 00/760067), Met1 (US 2009/0144863), and MADS3 genes, or the sucrose synthase intron (Vasil 1989), see The Maize Handbook, Chapter 116, Freeling and Walbot, Eds., Springer, New York, 1994); the Atc17 intron from the ADP-ribosylation factor 1 (ARF1) gene NEENAc17 intron from Arabidopsis thaliana (SEQ ID NO: 185), and the Atss1 intron from the aspartyl protease family protein related NEENA gene intron from Arabidopsis thaliana (SEQ ID NO: 186). More preferably, the intron sequences are:

[0311] (a) the introns of the rice Metallothionin1 (Met1) gene as described in, for example, US 2009/0144863 (hereby incorporated by reference in its entirety), preferably the first intron (intron I) thereof, most preferably an intron comprising the nucleotide sequence of SEQ ID NO: 111,

[0312] (b) the introns of the rice MADS3 gene, preferably the first intron (intron I) thereof, most preferably an intron comprising the nucleotide sequence of SEQ ID NO: 112,

[0313] (c) the introns of the Zea mays ubiquitin gene, preferably the first intron (intron I) thereof, as one embodiment an intron comprising the sequence of SEQ ID NO: 191,

[0314] (d) the introns of the rice actin gene, preferably the first intron (intron I) thereof, most preferably an intron comprising the nucleotides 121 to 568 of the sequence described by GenBank Accession No. X63830, and

[0315] (e) the introns of the Zea mays alcohol dehydrogenase (adh) gene, preferably the sixth intron (intron 6) thereof, most preferably an intron comprising the nucleotides 3,135 to 3,476 of the sequence described by GenBank Accession No. X04049.

[0316] Accordingly, in some preferred embodiments, the expression cassettes of the invention may further comprise an intron selected from the group consisting of:

[0317] (a) an intron of the rice Metallothionin1 gene comprising the nucleotide sequence of SEQ ID NO: 111 or a nucleotide sequence having at least 90%, preferably 95%, 96%, 97%, 98%, 99%, 99.1%, 99.2%, 99.3%, 99.4%, 99.5%, 99.6%, 99.7%, 99.8%, or 99.9% identity to the nucleotide sequence of SEQ ID NO: 111;

[0318] (b) an intron of the rice MADS3 gene comprising the nucleotide sequence of SEQ ID NO: 112 or a nucleotide sequence having at least 90%, preferably 95%, 96%, 97%, 98%, 99%, 99.1%, 99.2%, 99.3%, 99.4%, 99.5%, 99.6%, 99.7%, 99.8%, or 99.9% identity to the nucleotide sequence of SEQ ID NO: 112;

[0319] (c) an intron from the ADP-ribosylation factor 1 (ARF1) gene NEENAc17 intron from Arabidopsis thaliana comprising the nucleotide sequence of SEQ ID NO: 185 or a nucleotide sequence having at least 90%, preferably 95%, 96%, 97%, 98%, 99%, 99.1%, 99.2%, 99.3%, 99.4%, 99.5%, 99.6%, 99.7%, 99.8%, or 99.9% identity to the nucleotide sequence of SEQ ID NO: 185; and

[0320] (d) an intron from the aspartyl protease family protein related NEENA gene intron from Arabidopsis thaliana comprising the nucleotide sequence of SEQ ID NO: 186 or a nucleotide sequence having at least 90%, preferably 95%, 96%, 97%, 98%, 99%, 99.1%, 99.2%, 99.3%, 99.4%, 99.5%, 99.6%, 99.7%, 99.8%, or 99.9% identity to the nucleotide sequence of SEQ ID NO: 186.

[0321] Isolation of rice Metallothionein1 introns and functional variants thereof are described for example in US 2009/0144863 (hereby incorporated by reference in its entirety). Additional intron sequences with expression enhancing properties in plants may also be identified and isolated according to the disclosure of US 2006/0094976 (hereby incorporated by reference in its entirety).

[0322] 1.3 Protein Targeting Sequences

[0323] In addition to the aforementioned components, the expression cassettes of the present invention may further comprise protein targeting sequences. The term “protein targeting sequences” as used herein encompasses all nucleotide sequences encoding transit peptides for directing a protein to a particular cell compartment such as vacuole, nucleus, all types of plastids like amyloplasts, chloroplasts, or chromoplasts, extracellular space, mitochondria, endoplasmic reticulum, oil bodies, peroxisomes and other compartments of plant cells (for review see Kermode 1996, Crit. Rev. Plant Sci. 15: 285-423 and references cited therein).

[0324] In some embodiments, it may be advantageous to direct the pyruvate kinase or the polypeptide having pyruvate kinase activity that are encoded by the nucleic acid molecule comprised in the expression cassettes of the invention to a particular cell compartment or organelle, such as plastids or mitochondria. To do so, a plastid transit peptide or a mitochondrial peptide may be used. Nucleotide sequences encoding plastid transit peptides are known in the art, for example, as disclosed in U.S. Pat. No. 5,717,084, U.S. Pat. No. 5,728,925, U.S. Pat. No. 6,063,601, U.S. Pat. No. 6,130,366 and the like. Plastid-targeting transit peptides include, but are not limited to, the ferredoxin transit peptide and the starch branching enzyme 2b transit peptide. In one embodiment, the transit peptide is a plastid-targeting peptide from a ferredoxin gene. In another embodiment, the plastid-targeting peptide is from the ferredoxin gene of Silene pratensins (SpFdx) (for example, SEQ ID NO: 113 or SEQ ID NO: 184, each encoding SEQ ID NO: 114). SpFdx and several of its variants have been shown to effectively target polypeptides to the stroma (Pilon, et al., 1995, J Biol Chem. 270(8): 3882-93; Rensink, et al., 1998, Plant Physiol. 118(2): 691-699). In one embodiment, a mitochondria-targeting peptide from Citrullus lanatus can be used for targeting to the mitochondria (for example, SEQ ID NO: 138 encoding SEQ ID NO: 139).

[0325] Accordingly, in some preferred embodiments, the expression cassettes of the invention may further comprise at least one heterologous nucleotide sequence encoding a transit peptide to target the polypeptide having pyruvate kinase activity to a plastid, wherein the nucleotide sequence encoding the plastid-targeting transit peptide comprises:

[0326] (a) the nucleotide sequence of SEQ ID NO: 113 or 184;

[0327] (b) a nucleotide sequence having at least 95%, preferably 96%, 97%, 98%, 99%, 99.1%, 99.2%, 99.3%, 99.4%, 99.5%, 99.6%, 99.7%, 99.8%, or 99.9% identity to the sequence of SEQ ID NO: 113 or 184;

[0328] (c) a nucleotide sequence encoding the amino acid sequence of SEQ ID NO: 114; or

[0329] (d) a nucleotide sequence encoding a peptide having at least 95%, preferably 96%, 97%, 98%, 99%, 99.1%, 99.2%, 99.3%, 99.4%, 99.5%, 99.6%, 99.7%, 99.8%, or 99.9% identity to the amino acid sequence of SEQ ID NO: 114.

[0330] In other preferred embodiments, the expression cassettes of the invention may further comprise at least one heterologous nucleotide sequence encoding a transit peptide to target the polypeptide having pyruvate kinase activity to a mitochondria, wherein the nucleotide sequence encoding the mitochondrial targeting peptide comprises:

[0331] (a) the nucleotide sequence of SEQ ID NO: 138;

[0332] (b) a nucleotide sequence having at least 95%, preferably 96%, 97%, 98%, 99%, 99.1%, 99.2%, 99.3%, 99.4%, 99.5%, 99.6%, 99.7%, 99.8%, or 99.9% identity to the sequence of SEQ ID NO: 138;

[0333] (c) a nucleotide sequence encoding the amino acid sequence of SEQ ID NO: 139; or

[0334] (d) a nucleotide sequence encoding a peptide having at least 95%, preferably 96%, 97%, 98%, 99%, 99.1%, 99.2%, 99.3%, 99.4%, 99.5%, 99.6%, 99.7%, 99.8%, or 99.9% identity to the amino acid sequence of SEQ ID NO: 139.

[0335] 1.4 Preferred Embodiments of Pyruvate Kinase Expression Cassettes

[0336] It is found that, by expressing certain pyruvate kinases in a plant, plant cell, or plant part under control of some specific types of promoters, optionally in combination with other specific types of regulatory elements and/or targeting peptides, the content of one or more of protein, oil, or one or more amino acids in such a plant, plant cell, or plant part is surprisingly increased. In some situations, it is found that the expression of a pyruvate kinase under the control of such a combination of regulatory sequences may result in an unexpected increase in the content of protein and one or more amino acids in such a plant, plant cell, or plant part. In further situations, it is found that such expression surprisingly confers increased content in oil and one or more amino acids in a plant, plant cell, or plant part relative to a corresponding wild-type plant, plant cell, or plant part. In other situations, it is found that such expression surprisingly confers an increased content in protein, oil and one or more amino acids in such a plant, plant cell, or plant part relative to a corresponding wild-type plant, plant cell, or plant part. This section exemplifies some of such preferred expression cassettes of the invention.

[0337] In one aspect, the present invention provides expression cassette (I) comprising:

[0338] (a) a promoter that is functional in a plant as disclosed in Section 1.1.1;

[0339] (b) a nucleic acid molecule encoding a polypeptide having pyruvate kinase activity as disclosed in Section 1.1.2, wherein the nucleic acid molecule is heterologous and operably linked to the promoter; and

[0340] (c) a rice intron as disclosed in Section 1.2.

In another aspect, the present invention provides expression cassette (II) comprising:

[0341] (a) an endosperm-specific or endosperm-preferential promoter or an embryo-specific or embryo-preferential promoter as disclosed in Section 1.1.1;

[0342] (b) a nucleic acid molecule encoding a polypeptide having pyruvate kinase activity as disclosed in Section 1.1.2, wherein the nucleic acid molecule is heterologous and operably linked to the promoter; and

[0343] (c) as disclosed in Section 1.2.

In yet another aspect, the present invention provides expression cassette (III) comprising:

[0344] (a) a seed-specific or seed-preferential promoter as disclosed in Section 1.1.1; and

[0345] (b) a nucleic acid molecule encoding a polypeptide having pyruvate kinase activity as disclosed in Section 1.1.2, wherein the nucleic acid molecule is heterologous and operably linked to the promoter,

wherein expression of the nucleic acid molecule in a plant, plant cell, or plant part confers increased content of protein, oil, and one or more amino acids in said plant, plant cell, or plant part relative to a corresponding wild-type plant, plant cell, or plant part.

[0346] Preferably, the nucleic acid molecule encoding a polypeptide having pyruvate kinase activity to be included in the aforementioned expression cassettes (I), (II) and (III) of the invention comprises:

[0347] (i) the nucleotide sequence of SEQ ID NO: 1, 3, 5, 7, 9, 11 or 13;

[0348] (ii) a nucleotide sequence encoding the amino acid sequence of SEQ ID NO: 2, 4, 6, 8, 10, 12 or 14;

[0349] (iii) a nucleotide sequence having at least 60% identity to the nucleotide sequence of SEQ ID NO: 1, 3, 5, 7, 9, 11 or 13 and encoding a polypeptide having a Pfam:PF00224 pyruvate kinase barrel domain and a Pfam:PF02887 pyruvate kinase alpha/beta domain;

[0350] (iv) a nucleotide sequence encoding an amino acid sequence having at least 60% identity to the amino acid sequence of SEQ ID NO: 2, 4, 6, 8, 10, 12 or 14 and having a Pfam:PF00224 pyruvate kinase barrel domain and a Pfam:PF02887 pyruvate kinase alpha/beta domain;

[0351] (v) a nucleotide sequence encoding an amino acid sequence comprising a Pfam:PF00224 pyruvate kinase barrel domain and a Pfam:PF02887 pyruvate kinase alpha/beta domain, wherein the Pfam:PF00224 pyruvate kinase barrel domain has at least 80% identity to the amino acid residues 109 to 449 of SEQ ID NO: 2 or the amino acid residues 98 to 439 of SEQ ID NO: 10, and wherein the Pfam:PF02887 pyruvate kinase alpha/beta domain has at least 80% identity to the amino acid residues 462 to 578 of SEQ ID NO: 2 or the amino acid residues 452 to 566 of SEQ ID NO: 10; or

[0352] (vi) a nucleotide sequence encoding an amino acid sequence having at least 60% identity to the amino acid sequence of SEQ ID NO: 2, 4, 6, 8, 10, 12 or 14, wherein said amino acid sequence further comprises the amino acid sequence of SEQ ID NO: 102 and 103.

[0353] More preferably, the nucleic acid molecule encoding a polypeptide having pyruvate kinase activity to be included in the aforementioned expression cassettes (I) and (II) of the invention comprises:

[0354] (a) the nucleotide sequence of SEQ ID NO: 1, 3, 5, 7, 9, 11, 13, 15, 17, 19, 21, 23, 25, 27, 29, 31, 33, 35, 37, 39, 41, 43, 45, 47, 49, 51, 53, 55, 57, 59, 61, 63, 65, 67, 69, 71, 73, 75, 77, 79, 81, or 83;

[0355] (b) a nucleotide sequence encoding the amino acid sequence of SEQ ID NO: 2, 4, 6, 8, 10, 12, 14, 16, 18, 20, 22, 24, 26, 28, 30, 32, 34, 36, 38, 40, 42, 44, 46, 48, 50, 52, 54, 56, 58, 60, 62, 64, 66, 68, 70, 72, 74, 76, 78, 80, 82, or 84;

[0356] (c) a nucleotide sequence having at least 95% identity to the nucleotide sequence of SEQ ID NO: 1, 3, 5, 7, 9, 11 or 13; or

[0357] (d) a nucleotide sequence encoding an amino acid sequence having at least 95% identity to the amino acid sequence of SEQ ID NO: 2, 4, 6, 8, 10, 12 or 14.

[0358] In another aspect, the present invention provides expression cassette (IV) comprising:

[0359] (a) a promoter that is functional in a plant as disclosed in Section 1.1.1;

[0360] (b) a nucleic acid molecule encoding a polypeptide having pyruvate kinase activity as disclosed in Section 1.1.2, wherein the nucleic acid molecule is heterologous and operably linked to the promoter; and

[0361] (c) the first intron of the rice Metallothionin1 gene as disclosed in Section 1.2.

[0362] In a further aspect, the present invention provides expression cassette (V) comprising:

[0363] (a) a constitutive promoter that is functional in a plant as disclosed in Section 1.1.1;

[0364] (b) a nucleic acid molecule encoding a polypeptide having pyruvate kinase activity as disclosed in Section 1.1.2, wherein the nucleic acid molecule is heterologous and operably linked to the promoter; and

[0365] (c) an intron,

wherein the constitutive promoter comprises:

[0366] (i) the nucleotide sequence of SEQ ID NO: 109 or 110;

[0367] (ii) a nucleotide sequence having at least 95% identity to the nucleotide sequence of SEQ ID NO: 109 or 110, wherein said nucleotide sequence has constitutive expression activity; or

[0368] (iii) a fragment of the nucleotide sequence of SEQ ID NO: 109 or 110, wherein the fragment has constitutive expression activity.

[0369] Preferably, the nucleic acid molecule encoding a polypeptide having pyruvate kinase activity to be included in the aforementioned expression cassettes (IV) and (V) of the invention comprises:

[0370] (a) the nucleotide sequence of SEQ ID NO: 87 or 89;

[0371] (b) a nucleotide sequence encoding the amino acid sequence of SEQ ID NO: 88 or 90;

[0372] (c) a nucleotide sequence having at least 75% identity to the nucleotide sequence of SEQ ID NO: 87 or 89 and encoding a polypeptide having a Pfam:PF00224 pyruvate kinase barrel domain and a Pfam:PF02887 pyruvate kinase alpha/beta domain;

[0373] (d) a nucleotide sequence encoding an amino acid sequence having at least 75% identity to the amino acid sequence of SEQ ID NO: 88 or 90 and having a Pfam:PF00224 pyruvate kinase barrel domain and a Pfam:PF02887 pyruvate kinase alpha/beta domain;

[0374] (e) a nucleotide sequence encoding an amino acid sequence comprising a Pfam:PF00224 pyruvate kinase barrel domain and a Pfam:PF02887 pyruvate kinase alpha/beta domain, wherein the Pfam:PF00224 pyruvate kinase barrel domain has at least 80% identity to the amino acid residues 5 to 350 of SEQ ID NO: 88, and wherein the Pfam:PF02887 pyruvate kinase alpha/beta domain has at least 80% identity to the amino acid residues 362 to 478 of SEQ ID NO: 88; or

[0375] (f) a nucleotide sequence encoding an amino acid sequence having at least 75% identity to the amino acid sequence of SEQ ID NO: 88 or 90, wherein said amino acid sequence further comprises the amino acid sequence of SEQ ID NO: 102 and 103.

[0376] In some embodiments, the intron to be included in the aforementioned expression cassettes (I)-(V) of the invention is selected from the group consisting of:

[0377] (a) an intron of the rice Metallothionin1 gene, preferably, comprising the nucleotide sequence of SEQ ID NO: 111 or a nucleotide sequence having at least 90% identity to the nucleotide sequence of SEQ ID NO: 111; and

[0378] (b) an intron of the rice MADS3 gene, preferably, comprising the nucleotide sequence of SEQ ID NO: 112 or a nucleotide sequence having at least 90% identity to the nucleotide sequence of SEQ ID NO: 112.

[0379] Optionally, the aforementioned expression cassettes of the invention further comprise a heterologous nucleotide sequence encoding a transit peptide targeting the pyruvate kinase or the polypeptide having pyruvate kinase activity to a plastid as disclosed in Section 1.3.

[0380] The aforementioned expression cassettes of the invention may also optionally comprise a terminator as disclosed in Section 1.2.

[0381] Accordingly, examples of the expression cassettes of the invention may include, but not limited to, the various combinations of the nucleotide components as exemplified in Table 8 below.

TABLE 10
Examples of the pyruvate kinase expression cassettes of the invention.

| | | Targeting | | |
|---|---|---|---|---|
| Promoter | Intron | peptide | Gene | Terminator |
| Whole-seed | An intron of rice | Organelle- | Plant pyruvate | t-NOS (e.g. SEQ |
| specific or | Met1 (e.g. SEQ | targeting peptide | kinase (SEQ ID | ID NO: 115) or t- |
| preferential (e.g. | ID NO: 111) or | (e.g. SEQ ID | NO: 1, 3, 5, 7, 9, | OCS3 (e.g. SEQ |
| SEQ ID NO: | an intron of rice | NO: 113, 138, or | 11, or 13) | ID NO: 116) |
| 104, 143, 144, or | MADS3 (e.g. | 184) | | |
| 140) | SEQ ID NO: 112) | | | |
| Endosperm | An intron of rice | Organelle- | Plant pyruvate | t-NOS (e.g. SEQ |
| specific or | Met1 (e.g. SEQ | targeting peptide | kinase (SEQ ID | ID NO: 115) or t- |
| preferential (e.g. | ID NO: 111) or | (e.g. SEQ ID | NO: 1, 3, 5, 7, 9, | OCS3 (e.g. SEQ |
| SEQ ID NO: | an intron of rice | NO: 113, 138, or | 11, or 13) | ID NO: 116) |
| 106, 107, or 189) | MADS3 (e.g. | 184) | | |
| | SEQ ID NO: 112) | | | |
| Embryo specific | An intron of rice | Organelle- | Plant pyruvate | t-NOS (e.g. SEQ |
| or preferential | Met1 (e.g. SEQ | targeting peptide | kinase (SEQ ID | ID NO: 115) or t- |
| (SEQ ID NO: | ID NO: 111) or | (e.g. SEQ ID | NO: 1, 3, 5, 7, 9, | OCS3 (e.g. SEQ |
| 108) | an intron of rice | NO: 113, 138, or | 11, or 13) | ID NO: 116) |
| | MADS3 (e.g. | 184) | | |
| | SEQ ID NO: 112) | | | |
| Constitutive (e.g. | An intron of rice | Organelle- | E. coli pyruvate | t-NOS (e.g. SEQ |
| SEQ ID NO: 109 | Met1 (e.g. SEQ | targeting peptide | kinase (SEQ ID | ID NO: 115) or t- |
| or 110) | ID NO: 111) or | (e.g. SEQ ID | NO: 87 or 89) | OCS3 (e.g. SEQ |
| | an intron of rice | NO: 113, 138, or | | ID NO: 116) |
| | MADS3 (e.g. | 184) | | |
| | SEQ ID NO: 112) | | | |
| Constitutive (e.g. | An intron of rice | None | E. coli pyruvate | t-NOS (e.g: SEQ |
| SEQ ID NO: 109 | Met1 (e.g. SEQ | | kinase (SEQ ID | ID NO: 115) or t- |
| or 110) | ID NO: 111) or | | NO: 87 or 89) | OCS3 (e.g. SEQ |
| | an intron of rice | | | ID NO: 116) |
| | MADS3 (e.g. | | | |
| | SEQ ID NO: 112) | | | |
| Whole-seed | An intron of rice | Organelle- | E. coli pyruvate | t-NOS (e.g. SEQ |
| specific or | Met1 (e.g. SEQ | targeting peptide | kinase (SEQ ID | ID NO: 115) or t- |
| preferential (e.g. | ID NO: 111) or | (e.g. SEQ ID | NO: 87 or 89) | OCS3 (e.g. SEQ |
| SEQ ID NO: | an intron of rice | NO: 113, 138, or | | ID NO: 116) |
| 104, 143, 144, or | MADS3 (e.g. | 184) | | |
| 140) | SEQ ID NO: 112) | | | |
| Whole-seed | An intron of rice | None | E. coli pyruvate | t-NOS (e.g. SEQ |
| specific or | Met1 (e.g. SEQ | | kinase (SEQ ID | ID NO: 115) or t- |
| preferential (e.g. | ID NO: 111) or | | NO: 87 or 89) | OCS3 (e.g. SEQ |
| SEQ ID NO: | an intron of rice | | | ID NO: 116) |
| 104, 143, 144, or | MADS3 (e.g. | | | |
| 140) | SEQ ID NO: 112) | | | |
| Endosperm | An intron of rice | Organelle- | E. coli pyruvate | t-NOS (e.g. SEQ |
| specific or | Met1 (e.g. SEQ | targeting peptide | kinase (SEQ ID | ID NO: 115) or t- |
| preferential (e.g. | ID NO: 111) or | (e.g. SEQ ID | NO: 87 or 89) | OCS3 (e.g. SEQ |
| SEQ ID NO: | an intron of rice | NO: 113, 138, or | | ID NO: 116) |
| 106, 107, or 189) | MADS3 (e.g. | 184) | | |
| | SEQ ID NO: 112) | | | |
| Endosperm | An intron of rice | None | E. coli pyruvate | t-NOS (e.g. SEQ |
| specific or | Met1 (e.g. SEQ | | kinase (SEQ ID | ID NO: 115) or t- |
| preferential (e.g. | ID NO: 111) or | | NO: 87 or 89) | OCS3 (e.g. SEQ |
| SEQ ID NO: | an intron of rice | | | ID NO: 116) |
| 106, 107, or 189) | MADS3 (e.g. | | | |
| | SEQ ID NO: 112) | | | |
| Embryo specific | An intron of rice | Organelle- | E. coli pyruvate | t-NOS (e.g. SEQ |
| or preferential | Met1 (e.g. SEQ | targeting peptide | kinase (SEQ ID | ID NO: 115) or t- |
| (SEQ ID NO: | ID NO: 111) or | (e.g. SEQ ID | NO: 87 or 89) | OCS3 (e.g. SEQ |
| 108, 141 or 142) | an intron of rice | NO: 113, 138, or | | ID NO: 116) |
| | MADS3 (e.g. | 184) | | |
| | SEQ ID NO: 112) | | | |
| Embryo specific | An intron of rice | None | E. coli pyruvate | t-NOS (e.g. SEQ |
| or preferential | Met1 (e.g. SEQ | | kinase (SEQ ID | ID NO: 115) or t- |
| (SEQ ID NO: | ID NO: 111) or | | NO: 87 or 89) | OCS3 (e.g. SEQ |
| 108, 141 or 142) | an intron of rice | | | ID NO: 116) |
| | MADS3 (e.g. | | | |
| | SEQ ID NO: 112) | | | |

[0382] In some embodiments, the expression of the nucleic acid molecule encoding a polypeptide having pyruvate kinase activity included in the expression cassettes of the invention in a plant, plant cell, or plant part confers increased content in one or more of protein, oil, or one or more amino acids in said plant, plant cell, or plant part relative to a corresponding wild-type plant, plant cell, or plant part. In other embodiments, the expression of the nucleic acid molecule encoding a polypeptide having pyruvate kinase activity included in the expression cassettes of the invention in a plant, plant cell, or plant part confers increased content in protein and one or more amino acids in said plant, plant cell, or plant part relative to a corresponding wild-type plant, plant cell, or plant part. In further embodiments, the expression of the nucleic acid molecule encoding a polypeptide having pyruvate kinase activity included in the expression cassettes of the invention in a plant, plant cell, or plant part confers increased content in protein, oil, and one or more amino acids in said plant, plant cell, or plant part relative to a corresponding wild-type plant, plant cell, or plant part.

[0383] 1.5 Preferred Embodiments of TPS Homolog Expression Cassettes

[0384] It is found that, by expressing certain TPS homologs in a plant, plant cell, or plant part under control of some specific types of promoters, optionally in combination with other specific types of regulatory elements and/or targeting peptides, the content of one or more of protein, oil, or one or more amino acids in such a plant, plant cell, or plant part is surprisingly increased. This section exemplifies some of such preferred expression cassettes of the invention.

[0385] In one aspect, the present invention provides expression cassette (1) comprising:

[0386] (a) a promoter that is functional in a plant as disclosed in Section 1.1.1;

[0387] (b) a nucleic acid molecule encoding a TPS homolog as disclosed in Section 1.1.3; and

[0388] (c) a rice intron as disclosed in Section 1.2.

[0389] In another aspect, the present invention provides expression cassette (II) comprising:

[0390] (a) a constitutive promoter as disclosed in Section 1.1.1;

[0391] (b) a nucleic acid molecule encoding a TPS homolog as disclosed in Section 1.1.3; and

[0392] (c) an intron as disclosed in Section 1.2.

[0393] In yet another aspect, the present invention provides expression cassette (III) comprising:

[0394] (a) a promoter that is functional in a plant as disclosed in Section 1.1.1; and

[0395] (b) a nucleic acid molecule encoding a TPS homolog as disclosed in Section 1.1.3, wherein expression of the nucleic acid molecule in a plant, plant cell, or plant part confers increased content of protein and one or more amino acids in said plant, plant cell, or plant part relative to a corresponding wild-type plant, plant cell, or plant part.

[0396] Preferably, the nucleic acid molecule encoding a TPS homolog to be included in the aforementioned expression cassettes (I), (II) and (III) of the invention comprises:
[0397] (a) the nucleotide sequence of SEQ ID NO: 120, 122, 123, 125, 145, 147, 149, 151, 153, 155, 157, 159, 161, 163 or 165;
[0398] (b) a nucleotide sequence encoding the amino acid sequence of SEQ ID NO: 121, 124, 146, 148, 150, 152, 154, 156, 158, 160, 162, 164 or 166;
[0399] (c) a nucleotide sequence having at least 70% sequence identity to the nucleotide sequence of SEQ ID NO: 120, 122, 123, 125, 145, 147, 149, 151, 153, 155, 157, 159, 161, 163 or 165 and encoding a polypeptide having a Pfam:PF00982.15 glycosyltransferase family 20 domain and a Pfam:PF02358.10 trehalose-phosphatase domain;
[0400] (d) a nucleotide sequence encoding an amino acid sequence having at least 80% sequence identity to the amino acid sequence of SEQ ID NO: 121, 124, 146, 148, 150, 152, 154, 156, 158, 160, 162, 164 or 166 and having a Pfam:PF00982.15 glycosyltransferase family 20 domain and a Pfam:PF02358.10 trehalose-phosphatase domain; or
[0401] (e) a nucleotide sequence encoding an amino acid sequence comprising a Pfam:PF00982.15 glycosyltransferase family 20 domain and a Pfam:PF02358.10 trehalose-phosphatase domain, wherein the Pfam:PF00982.15 glycosyltransferase family 20 domain has at least 50% identity to amino acid residues 57 to 541 of SEQ ID NO: 121 or the amino acid residues 59 to 546 of SEQ ID NO: 124, and wherein the Pfam:PF02358.10 trehalose-phosphatase domain has at least 55% identity to the amino acid residues 590 to 825 of SEQ ID NO: 121 or the amino acid residues 595 to 830 of SEQ ID NO: 124.

[0402] More preferably, the nucleic acid molecule encoding a TPS homolog to be included in the aforementioned expression cassettes (I) and (II) of the invention comprises:

[0403] (a) the nucleotide sequence of SEQ ID NO: 120, 122, 123, 125, 145, 147, 149, 151, 153, 155, 157, 159, 161, 163 or 165;

[0404] (b) a nucleotide sequence encoding the amino acid sequence of SEQ ID NO: 121, 124, 146, 148, 150, 152, 154, 156, 158, 160, 162, 164 or 166;

[0405] (c) a nucleotide sequence having at least 95% identity to the nucleotide sequence of SEQ ID NO: 120, 122, 123, 125, 145, 147, 149, 151, 153, 155, 157, 159, 161, 163 or 165; or

[0406] (d) a nucleotide sequence encoding an amino acid sequence having at least 95% identity to the amino acid sequence of SEQ ID NO: 121, 124, 146, 148, 150, 152, 154, 156, 158, 160, 162, 164 or 166.

[0407] In another aspect, the present invention provides expression cassette (IV) comprising:

[0408] (a) a promoter that is functional in a plant as disclosed in Section 1.1.1;

[0409] (b) a nucleic acid molecule encoding a TPS homolog as disclosed in Section 1.1.3; and

[0410] (c) the first intron of the rice Metallothionin1 gene as disclosed in Section 1.2.

[0411] In a further aspect, the present invention provides expression cassette (V) comprising:

[0412] (a) a constitutive promoter that is functional in a plant as disclosed in Section 1.1.1;

[0413] (b) a nucleic acid molecule encoding a IPS homolog; and

[0414] (c) an intron,

wherein the constitutive promoter comprises:

[0415] (i) the nucleotide sequence of SEQ ID NO: 8 or 9;

[0416] (ii) a nucleotide sequence having at least 95% identity to the nucleotide sequence of SEQ ID NO: 109 or 110, wherein said nucleotide sequence has constitutive expression activity; or

[0417] (iii) a fragment of the nucleotide sequence of SEQ ID NO: 109 or 110, wherein the fragment has constitutive expression activity.

[0418] Preferably, the nucleic acid molecule encoding a IPS homolog to be included in the aforementioned expression cassettes (IV) and (V) of the invention comprises:

[0419] (a) the nucleotide sequence of SEQ ID NO: 120, 122, 123, 125, 145, 147, 149, 151, 153, 155, 157, 159, 161, 163 or 165;

[0420] (b) a nucleotide sequence encoding the amino acid sequence of SEQ ID NO: 121, 124, 146, 148, 150, 152, 154, 156, 158, 160, 162, 164 or 166;

[0421] (c) a nucleotide sequence having at least 70% identity to the nucleotide sequence of SEQ ID NO: 120, 122, 123, 125, 145, 147, 149, 151, 153, 155, 157, 159, 161, 163 or 165; or

[0422] (d) a nucleotide sequence encoding an amino acid sequence having at least 80% identity to the amino acid sequence of SEQ ID NO: 121, 124, 146, 148, 150, 152, 154, 156, 158, 160, 162, 164 or 166.

[0423] In some embodiments, the intron to be included in the aforementioned expression cassettes (I)-(V) of the invention is an intron of the rice Metallothionein1 gene, preferably, comprising the nucleotide sequence of SEQ ID NO: 111 or a nucleotide sequence having at least 90% identity to the nucleotide sequence of SEQ ID NO: 111.

[0424] Optionally, the aforementioned expression cassettes of the invention further comprise a heterologous nucleotide sequence encoding a transit peptide targeting the TPS homolog to a plastid as disclosed in Section 1.3. For example, in one embodiment, the expression cassette comprises a promoter that is functional in a plant as disclosed in Section 1.1.1, a nucleic acid molecule

[0425] The aforementioned expression cassettes of the invention may also optionally comprise a terminator as disclosed in Section 1.2.

[0426] Accordingly, examples of the expression cassettes of the invention may include, but are not limited to, the various combinations of the nucleotide components as exemplified in Table 3 below.

TABLE 11
Examples of the TPS homolog expression cassettes of the invention.

| | | Targeting | | |
|---|---|---|---|---|
| Promoter | Intron | peptide | Gene | Terminator |
| Embryo-specific | An intron of rice | Organelle- | TPS homolog | t-NOS (e.g. SEQ |
| or preferential | Met1 (e.g. SEQ | targeting peptide | (e.g. SEQ ID | ID NO: 115) or t- |
| (e.g. SEQ ID | ID NO: 111) or | (e.g. SEQ ID | NO: 120, 122, | OCS3 (e.g. SEQ |
| NO: 108, 141, or | an intron of rice | NO: 113, 138, or | 123, 125, 145, | ID NO: 116) |
| 142) | MADS3 (e.g. | 184) | 147, 149, 151, | |
| | SEQ ID NO: | | 153, 155, 157, | |
| | 112) | | 159, 161, 163 or | |
| | | | 165) | |
| Embryo-specific | An intron of rice | None | TPS homolog | t-NOS (e.g. SEQ |
| or preferential | Met1 (e.g. SEQ | | (e.g. SEQ ID | ID NO: 115) or t- |
| (e.g. SEQ ID | ID NO: 111) or | | NO: 120, 122, | OCS3 (e.g. SEQ |
| NO: 108, 141, or | an intron of rice | | 123, 125, 145, | ID NO: 116) |
| 142) | MADS3 (e.g. | | 147, 149, 151, | |
| | SEQ ID NO: | | 153, 155, 157, | |
| | 112) | | 159, 161, 163 or | |
| | | | 165) | |
| Embryo-specific | None | Organelle- | TPS homolog | t-NOS (e.g. SEQ |
| or preferential | | targeting peptide | (e.g. SEQ ID | ID NO: 115) or t- |
| (e.g. SEQ ID | | (e.g. SEQ ID | NO: 120, 122, | OCS3 (e.g. SEQ |
| NO: 108, 141, or | | NO: 113, 138, or | 123, 125, 145, | ID NO: 116) |
| 142) | | 184) | 147, 149, 151, | |
| | | | 153, 155, 157, | |
| | | | 159, 161, 163 or | |
| | | | 165) | |
| Embryo-specific | None | None | TPS homolog | t-NOS (e.g. SEQ |
| or preferential | | | (e.g. SEQ ID | ID NO: 115) or t- |
| (e.g. SEQ ID | | | NO: 120, 122, | OCS3 (e.g. SEQ |
| NO: 108, 141, or | | | 123, 125, 145, | ID NO: 116) |
| 142) | | | 147, 149, 151, | |
| | | | 153, 155, 157, | |
| | | | 159, 161, 163 or | |
| | | | 165) | |
| Whole-seed | An intron of rice | Organelle- | TPS homolog | t-NOS (e.g. SEQ |
| specific or | Met1 (e.g. SEQ | targeting peptide | (e.g. SEQ ID | ID NO: 115) or t- |
| preferential (e.g. | ID NO: 111) or | (e.g. SEQ ID | NO: 120, 122, | OCS3 (e.g. SEQ |
| SEQ ID NO: | an intron of rice | NO: 113, 138, or | 123, 125, 145, | ID NO: 116) |
| 104, 143, 144, or | MADS3 (e.g. | 184) | 147, 149, 151, | |
| 140) | SEQ ID NO: | | 153, 155, 157, | |
| | 112) | | 159, 161, 163 or | |
| | | | 165) | |
| Whole-seed | An intron of rice | None | TPS homolog | t-NOS (e.g. SEQ |
| specific or | Met1 (e.g. SEQ | | (e.g. SEQ ID | ID NO: 115) or t- |
| preferential (e.g. | ID NO: 111) or | | NO: 120, 122, | OCS3 (e.g. SEQ |
| SEQ ID NO: | an intron of rice | | 123, 125, 145, | ID NO: 116) |
| 104, 143, 144, or | MADS3 (e.g. | | 147, 149, 151, | |
| 140) | SEQ ID NO: | | 153, 155, 157, | |
| | 112) | | 159, 161, 163 or | |
| | | | 165) | |
| Whole-seed | None | Organelle- | TPS homolog | t-NOS (e.g. SEQ |
| specific or | | targeting peptide | (e.g. SEQ ID | ID NO: 115) or t- |
| preferential (e.g. | | (e.g. SEQ ID | NO: 120, 122, | OCS3 (e.g. SEQ |
| SEQ ID NO: | | NO: 113, 138, or | 123, 125, 145, | ID NO: 116) |
| 104, 143, 144, or | | 184) | 147, 149, 151, | |
| 140) | | | 153, 155, 157, | |
| | | | 159, 161, 163 or | |
| | | | 165) | |
| Whole-seed | None | None | TPS homolog | t-NOS (e.g. SEQ |
| specific or | | | (e.g. SEQ ID | ID NO: 115) or t- |
| preferential (e.g. | | | NO: 120, 122, | OCS3 (e.g. SEQ |
| SEQ ID NO: | | | 123, 125, 145, | ID NO: 116) |
| 104, 143, 144, or | | | 147, 149, 151, | |
| 140) | | | 153, 155, 157, | |
| | | | 159, 161, 163 or | |
| | | | 165) | |
| Endosperm | An intron of rice | Organelle- | TPS homolog | t-NOS (e.g. SEQ |
| specific or | Met1 (e.g. SEQ | targeting peptide | (e.g. SEQ ID | ID NO: 115) or t- |
| preferential (e.g. | ID NO: 111) or | (e.g. SEQ ID | NO: 120, 122, | OCS3 (e.g. SEQ |
| SEQ ID NO: | an intron of rice | NO: 113, 138, or | 123, 125, 145, | ID NO: 116) |
| 106, 107, or 189) | MADS3 (e.g. | 184) | 147, 149, 151, | |
| | SEQ ID NO: | | 153, 155, 157, | |
| | 112) | | 159, 161, 163 or | |
| | | | 165) | |
| Endosperm | An intron of rice | None | TPS homolog | t-NOS (e.g. SEQ |
| specific or | Met1 (e.g. SEQ | | (e.g. SEQ ID | ID NO: 115) or t- |
| preferential (e.g. | ID NO: 111) or | | NO: 120, 122, | OCS3 (e.g. SEQ |
| SEQ ID NO: | an intron of rice | | 123, 125, 145, | ID NO: 116) |
| 106, 107, or 189) | MADS3 (e.g. | | 147, 149, 151, | |
| | SEQ ID NO: | | 153, 155, 157, | |
| | 112) | | 159, 161, 163 or | |
| | | | 165) | |
| Endosperm | None | Organelle- | TPS homolog | t-NOS (e.g. SEQ |
| specific or | | targeting peptide | (e.g. SEQ ID | ID NO: 115) or t- |
| preferential (e.g. | | (e.g. SEQ ID | NO: 120, 122, | OCS3 (e.g. SEQ |
| SEQ ID NO: | | NO: 113, 138, or | 123, 125, 145, | ID NO: 116) |
| 106, 107, or 189) | | 184) | 147, 149, 151, | |
| | | | 153, 155, 157, | |
| | | | 159, 161, 163 or | |
| | | | 165) | |
| Endosperm | None | None | TPS homolog | t-NOS (e.g. SEQ |
| specific or | | | (e.g. SEQ ID | ID NO: 115) or t- |
| preferential (e.g. | | | NO: 120, 122, | OCS3 (e.g. SEQ |
| SEQ ID NO: | | | 123, 125, 145, | ID NO: 116) |
| 106, 107, or 189) | | | 147, 149, 151, | |
| | | | 153, 155, 157, | |
| | | | 159, 161, 163 or | |
| | | | 165) | |
| Constitutive (e.g. | An intron of rice | Organelle- | TPS homolog | t-NOS (e.g. SEQ |
| SEQ ID NO: 109 | Met1 (e.g. SEQ | targeting peptide | (e.g. SEQ ID | ID NO: 115) or t- |
| or 110 or 188) | ID NO: 111) or | (e.g. SEQ ID | NO: 120, 122, | OCS3 (e.g. SEQ |
| | an intron of rice | NO: 113, 138, or | 123, 125, 145, | ID NO: 116) |
| | MADS3 (e.g. | 184) | 147, 149, 151, | |
| | SEQ ID NO: | | 153, 155, 157, | |
| | 112) | | 159, 161, 163 or | |
| | | | 165) | |
| Constitutive (e.g. | An intron of rice | None | TPS homolog | t-NOS (e.g. SEQ |
| SEQ ID NO: 109 | Met1 (e.g. SEQ | | (e.g. SEQ ID | ID NO: 115) or t- |
| or 110 or 188) | ID NO: 111) or | | NO: 120, 122, | OCS3 (e.g. SEQ |
| | an intron of rice | | 123, 125, 145, | ID NO: 116) |
| | MADS3 (e.g. | | 147, 149, 151, | |
| | SEQ ID NO: | | 153, 155, 157, | |
| | 112) | | 159, 161, 163 or | |
| | | | 165) | |
| Constitutive (e.g. | None | Organelle- | TPS homolog | t-NOS (e.g. SEQ |
| SEQ ID NO: 109 | | targeting peptide | (e.g. SEQ ID | ID NO: 115) or t- |
| or 110 or 188) | | (e.g. SEQ ID | NO: 120, 122, | OCS3 (e.g. SEQ |
| | | NO: 113, 138, or | 123, 125, 145, | ID NO: 116) |
| | | 184) | 147, 149, 151, | |
| | | | 153, 155, 157, | |
| | | | 159, 161, 163 or | |
| | | | 165) | |
| Constitutive (e.g. | None | None | TPS homolog | t-NOS (e.g. SEQ |
| SEQ ID NO: 109 | | | (e.g. SEQ ID | ID NO: 115) or t- |
| or 110 or 188) | | | NO: 120, 122, | OCS3 (e.g. SEQ |
| | | | 123, 125, 145, | ID NO: 116) |
| | | | 147, 149, 151, | |
| | | | 153, 155, 157, | |
| | | | 159, 161, 163 or | |
| | | | 165) | |

[0427] In some embodiments, the expression of the nucleic acid molecule encoding a TPS homolog included in the expression cassettes of the invention in a plant, plant cell, or plant part confers an increase in one or more of protein, oil, or one or more amino acids in said plant, plant cell, or plant part relative to a corresponding wild-type plant, plant cell, or plant part. In one embodiment, the expression of the nucleic acid molecule encoding a TPS homolog confers an increase in protein relative to a corresponding wild-type plant, plant cell, or plant part. In another embodiment, the expression of the nucleic acid molecule encoding a TPS homolog confers an increase in oil relative to a corresponding wild-type plant, plant cell, or plant part. In a further embodiment, the expression of the nucleic acid molecule encoding a TPS homolog confers an increase in one or more amino acids relative to a corresponding wild-type plant, plant cell, or plant part. In a preferred embodiment, the expression of the nucleic acid molecule encoding a TPS homolog confers an increase in protein and one or more amino acids relative to a corresponding wild-type plant, plant cell, or plant part. In another embodiment, the expression of the nucleic acid molecule encoding a TPS homolog confers an increase in oil and one or more amino acids in a plant, plant cell, or plant part relative to a corresponding wild-type plant, plant cell, or plant part. In a more preferred embodiment, the expression of the nucleic acid molecule encoding a TPS homolog confers an increase in protein, oil, and one or more amino acids relative to a corresponding wild-type plant, plant cell, or plant part.

### 2. Recombinant Constructs and Vectors

[0428] The aforementioned expression cassettes are preferably comprised in a recombinant construct and/or a vector, preferably a plant transformation vector. Numerous vectors for recombinant DNA manipulation or plant transformation are known to the person skilled in the pertinent art. The selection of vector will depend upon the host cell employed. Similarly, the selection of plant transformation vector will depend upon the preferred transformation technique and the target species for transformation.

[0429] 2.1 Recombinant Constructs

[0430] Another aspect of the invention refers to a recombinant construct comprising at least one of the aforementioned expression cassettes. Preferably, the recombinant construct comprises at least one aforementioned expression cassette comprising other regulatory elements described herein for directing the expression of the nucleic acid sequence comprised in the aforementioned expression cassette in an appropriate host cell. More preferably, the recombinant construct comprises at least one aforementioned expression cassette with at least one terminator. Optionally, or in another embodiment, the recombinant construct may comprise at least one aforementioned expression cassette further comprising at least one expression enhancing sequence such as an intron sequence as exemplified herein, for example, in Section 2.

[0431] It is further within the scope of the invention that a recombinant construct may comprise more than one aforementioned expression cassette. It is also to be understood that each expression cassette to be included in the recombinant construct may further comprise at least one regulatory element of the same or different type as described herein.

[0432] For example, a further aspect of the invention refers to a recombinant construct comprising at least one of the aforementioned pyruvate kinase expression cassettes and at least one of the aforementioned TPS homolog expression cassettes. Preferably, the recombinant construct comprises at least one aforementioned pyruvate kinase expression cassette and at least one aforementioned TPS homolog expression cassette, each comprising other regulatory elements described herein for directing the expression of the nucleic acid molecule comprised in the aforementioned expression cassettes in an appropriate host cell. More preferably, the recombinant construct comprises at least one aforementioned pyruvate kinase expression cassette with at least one terminator and at least one aforementioned TPS homolog expression cassette with at least one terminator. Optionally, or in other embodiments, the recombinant construct may comprise at least one aforementioned pyruvate kinase expression cassette and at least one aforementioned TPS homolog expression cassette, each cassette further comprising at least one expression enhancing sequence such as an intron sequence as exemplified herein, for example, in Section 1.2.

[0433] It is further within the scope of the invention that a recombinant construct may comprise a pyruvate kinase expression cassette, a TPS homolog expression cassette, and one or more additional expression cassettes. It is also to be understood that each expression cassette to be included in the recombinant construct may further comprise at least one regulatory element of the same or different type as described herein.

[0434] Examples of recombinant constructs containing a pyruvate kinase expression cassette and a TPS homolog expression cassette are provided in Table 12 below.

TABLE 12
Examples of recombinant constructs comprising a TPS homolog expression cassette and a pyruvate kinase expression cassette.
Examples of TPS homolog genes include SEQ ID NO: 120, 122, 123, 125, 145, 147, 149, 151, 153, 155, 157, 159, 161, 163 or 165.
Examples of PK genes include SEQ ID NO: 1, 3, 5, 7, 9, 11, 13, 87, or 89.

| TPS homolog expression cassette | | | | | Pyruvate kinase expression cassette | | | | |
|---|---|---|---|---|---|---|---|---|---|
| | | Targeting | | | | | Targeting | | |
| Promoter | Intron | peptide | Gene | Terminator | Promoter | Intron | peptide | Gene | Terminator |
| Constitutive | iMet | SpFdx | TPS | t-NOS (e.g | Constitutive | iMet | SpFdx | PK | t-NOS (e.g |
| (e.g. SEQ ID | (SEQ ID | (SEQ ID | homolog | SEQ ID | (e.g. SEQ ID | (SEQ ID | (SEQ ID | | SEQ ID |
| NO: 109 or | NO: 111), | NO: 113 | | NO: 115), | NO: 109 or 110 | NO: 111), | NO: 113 | | NO: 115), |
| 110 or 188) | iMADS3 | or 184) or | | t-OCS3 | or 188) | iMADS3 | or 184) or | | t-OCS3 |
| | (SEQ ID | ClmMD | | (e.g. SEQ | | (SEQ ID | ClmMD | | (e.g. SEQ |
| | NO: 112), | (SEQ ID | | ID NO: | | NO: 112), | (SEQ ID | | ID NO: |
| | iAtc17 | NO: 138) | | 116), | | iAtc17 | NO: 138) | | 116), |
| | (SEQ ID | or none | | TOI3357 | | (SEQ ID | or none | | TOI3357 |
| | NO: 185), | | | (SEQ ID | | NO: 185), | | | (SEQ ID |
| | iAtss1 | | | NO: 187) | | iAtss1 | | | NO: 187) |
| | (SEQ ID | | | or none | | (SEQ ID | | | or none |
| | NO: 186), | | | | | NO: 186), | | | |
| | or none | | | | | or none | | | |
| Constitutive | iMet | SpFdx | TPS | t-NOS (e.g | Whole seed | iMet | SpFdx | PK | t-NOS (e.g |
| (e.g. SEQ ID | (SEQ ID | (SEQ ID | homolog | SEQ ID | specific or | (SEQ ID | (SEQ ID | | SEQ ID |
| NO: 109 or | NO: 111), | NO: 113 | | NO: 115), | preferential | NO: 111), | NO: 113 | | NO: 115), |
| 110 or 188) | iMADS3 | or 184) or | | t-OCS3 | (e.g. SEQ ID | iMADS3 | or 184) or | | t-OCS3 |
| | (SEQ ID | ClmMD | | (e.g. SEQ | NO: 104, 140, | (SEQ ID | ClmMD | | (e.g. SEQ |
| | NO: 112), | (SEQ ID | | ID NO: | 143, or 144) | NO: 112), | (SEQ ID | | ID NO: |
| | iAtc17 | NO: 138) | | 116), | | iAtc17 | NO: 138) | | 116), |
| | (SEQ ID | or none | | TOI3357 | | (SEQ ID | or none | | TOI3357 |
| | NO: 185), | | | (SEQ ID | | NO: 185), | | | (SEQ ID |
| | iAtss1 | | | NO: 187) | | iAtss1 | | | NO: 187) |
| | (SEQ ID | | | or none | | (SEQ ID | | | or none |
| | NO: 186), | | | | | NO: 186), | | | |
| | or none | | | | | or none | | | |
| Constitutive | iMet | SpFdx | TPS | t-NOS (e.g | Endosperm | iMet | SpFdx | PK | t-NOS (e.g |
| (e.g. SEQ ID | (SEQ ID | (SEQ ID | homolog | SEQ ID | specific or | (SEQ ID | (SEQ ID | | SEQ ID |
| NO: 109 or | NO: 111), | NO: 113 | | NO: 115), | preferential | NO: 111), | NO: 113 | | NO: 115), |
| 110 or 188) | iMADS3 | or 184) or | | t-OCS3 | (e.g. SEQ ID | iMADS3 | or 184) or | | t-OCS3 |
| | (SEQ ID | ClmMD | | (e.g. SEQ | NO: 106, 107, | (SEQ ID | ClmMD | | (e.g. SEQ |
| | NO: 112), | (SEQ ID | | ID NO: | or 189) | NO: 112), | (SEQ ID | | ID NO: |
| | iAtc17 | NO: 138) | | 116), | | iAtc17 | NO: 138) | | 116), |
| | (SEQ ID | or none | | TOI3357 | | (SEQ ID | or none | | TOI3357 |
| | NO: 185), | | | (SEQ ID | | NO: 185), | | | (SEQ ID |
| | iAtss1 | | | NO: 187) | | iAtss1 | | | NO: 187) |
| | (SEQ ID | | | or none | | (SEQ ID | | | or none |
| | NO: 186), | | | | | NO: 186), | | | |
| | or none | | | | | or none | | | |
| Constitutive | iMet | SpFdx | TPS | t-NOS (e.g | Embryo | iMet | SpFdx | PK | t-NOS (e.g |
| (e.g. SEQ ID | (SEQ ID | (SEQ ID | homolog | SEQ ID | specific or | (SEQ ID | (SEQ ID | | SEQ ID |
| NO: 109 or | NO: 111), | NO: 113 | | NO: 115), | preferential | NO: 111), | NO: 113 | | NO: 115), |
| 110 or 188) | iMADS3 | or 184) or | | t-OCS3 | (e.g. SEQ ID | iMADS3 | or 184) or | | t-OCS3 |
| | (SEQ ID | ClmMD | | (e.g. SEQ | NO: 108, 141, | (SEQ ID | ClmMD | | (e.g. SEQ |
| | NO: 112), | (SEQ ID | | ID NO: | or 142) | NO: 112), | (SEQ ID | | ID NO: |
| | iAtc17 | NO: 138) | | 116), | | iAtc17 | NO: 138) | | 116), |
| | (SEQ ID | or none | | TOI3357 | | (SEQ ID | or none | | TOI3357 |
| | NO: 185), | | | (SEQ ID | | NO: 185), | | | (SEQ ID |
| | iAtss1 | | | NO: 187) | | iAtss1 | | | NO: 187) |
| | (SEQ ID | | | or none | | (SEQ ID | | | or none |
| | NO: 186), | | | | | NO: 186), | | | |
| | or none | | | | | or none | | | |
| Whole seed | iMet | SpFdx | TPS | t-NOS (e.g | Constitutive | iMet | SpFdx | PK | t-NOS (e.g |
| specific or | (SEQ ID | (SEQ ID | homolog | SEQ ID | (e.g. SEQ ID | (SEQ ID | (SEQ ID | | SEQ ID |
| preferential | NO: 111), | NO: 113 | | NO: 115), | NO: 109 or 110 | NO: 111), | NO: 113 | | NO: 115), |
| (e.g. SEQ ID | iMADS3 | or 184) or | | t-OCS3 | or 188) | iMADS3 | or 184) or | | t-OCS3 |
| NO: 104, 140, | (SEQ ID | ClmMD | | (e.g. SEQ | | (SEQ ID | ClmMD | | (e.g. SEQ |
| 143, or 144) | NO: 112), | (SEQ ID | | ID NO: | | NO: 112), | (SEQ ID | | ID NO: |
| | iAtc17 | NO: 138) | | 116), | | iAtc17 | NO: 138) | | 116), |
| | (SEQ ID | or none | | TOI3357 | | (SEQ ID | or none | | TOI3357 |
| | NO: 185), | | | (SEQ ID | | NO: 185), | | | (SEQ ID |
| | iAtss1 | | | NO: 187) | | iAtss1 | | | NO: 187) |
| | (SEQ ID | | | or none | | (SEQ ID | | | or none |
| | NO: 186), | | | | | NO: 186), | | | |
| | or none | | | | | or none | | | |
| Whole seed | iMet | SpFdx | TPS | t-NOS (e.g | Whole seed | iMet | SpFdx | PK | t-NOS (e.g |
| specific or | (SEQ ID | (SEQ ID | homolog | SEQ ID | specific or | (SEQ ID | (SEQ ID | | SEQ ID |
| preferential | NO: 111), | NO: 113 | | NO: 115), | preferential | NO: 111), | NO: 113 | | NO: 115), |
| (e.g. SEQ ID | iMADS3 | or 184) or | | t-OCS3 | (e.g. SEQ ID | iMADS3 | or 184) or | | t-OCS3 |
| NO: 104, 140, | (SEQ ID | ClmMD | | (e.g. SEQ | NO: 104, 140, | (SEQ ID | ClmMD | | (e.g. SEQ |
| 143, or 144) | NO: 112), | (SEQ ID | | ID NO: | 143, or 144) | NO: 112), | (SEQ ID | | ID NO: |
| | iAtc17 | NO: 138) | | 116), | | iAtc17 | NO: 138) | | 116), |
| | (SEQ ID | or none | | TOI3357 | | (SEQ ID | or none | | TOI3357 |
| | NO: 185), | | | (SEQ ID | | NO: 185), | | | (SEQ ID |
| | iAtss1 | | | NO: 187) | | iAtss1 | | | NO: 187) |
| | (SEQ ID | | | or none | | (SEQ ID | | | or none |
| | NO: 186), | | | | | NO: 186), | | | |
| | or none | | | | | or none | | | |
| Whole seed | iMet | SpFdx | TPS | t-NOS (e.g | Endosperm | iMet | SpFdx | PK | t-NOS (e.g |
| specific or | (SEQ ID | (SEQ ID | homolog | SEQ ID | specific or | (SEQ ID | (SEQ ID | | SEQ ID |
| preferential | NO: 111), | NO: 113 | | NO: 115), | preferential | NO: 111), | NO: 113 | | NO: 115), |
| (e.g. SEQ ID | iMADS3 | or 184) or | | t-OCS3 | (e.g. SEQ ID | iMADS3 | or 184) or | | t-OCS3 |
| NO: 104, 140, | (SEQ ID | ClmMD | | (e.g. SEQ | NO: 106, 107, | (SEQ ID | ClmMD | | (e.g. SEQ |
| 143, or 144,) | NO: 112), | (SEQ ID | | ID NO: | or 189) | NO: 112), | (SEQ ID | | ID NO: |
| | iAtc17 | NO: 138) | | 116), | | iAtc17 | NO: 138) | | 116), |
| | (SEQ ID | or none | | TOI3357 | | (SEQ ID | or none | | TOI3357 |
| | NO: 185), | | | (SEQ ID | | NO: 185), | | | (SEQ ID |
| | iAtss1 | | | NO: 187) | | iAtss1 | | | NO: 187) |
| | (SEQ ID | | | or none | | (SEQ ID | | | or none |
| | NO: 186), | | | | | NO: 186), | | | |
| | or none | | | | | or none | | | |
| Whole seed | iMet | SpFdx | TPS | t-NOS (e.g | Embryo | iMet | SpFdx | PK | t-NOS (e.g |
| specific or | (SEQ ID | (SEQ ID | homolog | SEQ ID | specific or | (SEQ ID | (SEQ ID | | SEQ ID |
| preferential | NO: 111), | NO: 113 | | NO: 115), | preferential | NO: 111), | NO: 113 | | NO: 115), |
| (e.g. SEQ ID | iMADS3 | or 184) or | | t-OCS3 | (e.g. SEQ ID | iMADS3 | or 184) or | | t-OCS3 |
| NO: 104, 140, | (SEQ ID | ClmMD | | (e.g. SEQ | NO: 108, 141, | (SEQ ID | ClmMD | | (e.g. SEQ |
| 143, or 144) | NO: 112), | (SEQ ID | | ID NO: | or 142) | NO: 112), | (SEQ ID | | ID NO: |
| | iAtc17 | NO: 138) | | 116), | | iAtc17 | NO: 138) | | 116), |
| | (SEQ ID | or none | | TOI3357 | | (SEQ ID | or none | | TOI3357 |
| | NO: 185), | | | (SEQ ID | | NO: 185), | | | (SEQ ID |
| | iAtss1 | | | NO: 187) | | iAtss1 | | | NO: 187) |
| | (SEQ ID | | | or none | | (SEQ ID | | | or none |
| | NO: 186), | | | | | NO: 186), | | | |
| | or none | | | | | or none | | | |
| Endosperm | iMet | SpFdx | TPS | t-NOS (e.g | Constitutive | iMet | SpFdx | PK | t-NOS (e.g |
| specific or | (SEQ ID | (SEQ ID | homolog | SEQ ID | (e.g. SEQ ID | (SEQ ID | (SEQ ID | | SEQ ID |
| preferential | NO: 111), | NO: 113 | | NO: 115), | NO: 109 or 110 | NO: 111), | NO: 113 | | NO: 115), |
| (e.g. SEQ ID | iMADS3 | or 184) or | | t-OCS3 | or 188) | iMADS3 | or 184) or | | t-OCS3 |
| NO: 106, 107, | (SEQ ID | ClmMD | | (e.g. SEQ | | (SEQ ID | ClmMD | | (e.g. SEQ |
| or 189) | NO: 112), | (SEQ ID | | ID NO: | | NO: 112), | (SEQ ID | | ID NO: |
| | iAtc17 | NO: 138) | | 116), | | iAtc17 | NO: 138) | | 116), |
| | (SEQ ID | or none | | TOI3357 | | (SEQ ID | or none | | TOI3357 |
| | NO: 185), | | | (SEQ ID | | NO: 185), | | | (SEQ ID |
| | iAtss1 | | | NO: 187) | | iAtss1 | | | NO: 187) |
| | (SEQ ID | | | or none | | (SEQ ID | | | or none |
| | NO: 186), | | | | | NO: 186), | | | |
| | or none | | | | | or none | | | |
| Endosperm | iMet | SpFdx | TPS | t-NOS (e.g | Whole seed | iMet | SpFdx | PK | t-NOS (e.g |
| specific or | (SEQ ID | (SEQ ID | homolog | SEQ ID | specific or | (SEQ ID | (SEQ ID | | SEQ ID |
| preferential | NO: 111), | NO: 113 | | NO: 115), | preferential | NO: 111), | NO: 113 | | NO: 115), |
| (e.g. SEQ ID | iMADS3 | or 184) or | | t-OCS3 | (e.g. SEQ ID | iMADS3 | or 184) or | | t-OCS3 |
| NO: 106, 107, | (SEQ ID | ClmMD | | (e.g. SEQ | NO: 104, 140, | (SEQ ID | ClmMD | | (e.g. SEQ |
| or 189) | NO: 112), | (SEQ ID | | ID NO: | 143, or 144) | NO: 112), | (SEQ ID | | ID NO: |
| | iAtc17 | NO: 138) | | 116), | | iAtc17 | NO: 138) | | 116), |
| | (SEQ ID | or none | | TOI3357 | | (SEQ ID | or none | | TOI3357 |
| | NO: 185), | | | (SEQ ID | | NO: 185), | | | (SEQ ID |
| | iAtss1 | | | NO: 187) | | iAtss1 | | | NO: 187) |
| | (SEQ ID | | | or none | | (SEQ ID | | | or none |
| | NO: 186), | | | | | NO: 186), | | | |
| | or none | | | | | or none | | | |
| Endosperm | iMet | SpFdx | TPS | t-NOS (e.g | Endosperm | iMet | SpFdx | PK | t-NOS (e.g |
| specific or | (SEQ ID | (SEQ ID | homolog | SEQ ID | specific or | (SEQ ID | (SEQ ID | | SEQ ID |
| preferential | NO: 111), | NO: 113 | | NO: 115), | preferential | NO: 111), | NO: 113 | | NO: 115), |
| (e.g. SEQ ID | iMADS3 | or 184) or | | t-OCS3 | (e.g. SEQ ID | iMADS3 | or 184) or | | t-OCS3 |
| NO: 106, 107, | (SEQ ID | ClmMD | | (e.g. SEQ | NO: 106, 107, | (SEQ ID | ClmMD | | (e.g. SEQ |
| or 189) | NO: 112), | (SEQ ID | | ID NO: | or 189) | NO: 112), | (SEQ ID | | ID NO: |
| | iAtc17 | NO: 138) | | 116), | | iAtc17 | NO: 138) | | 116), |
| | (SEQ ID | or none | | TOI3357 | | (SEQ ID | or none | | TOI3357 |
| | NO: 185), | | | (SEQ ID | | NO: 185), | | | (SEQ ID |
| | iAtss1 | | | NO: 187) | | iAtss1 | | | NO: 187) |
| | (SEQ ID | | | or none | | (SEQ ID | | | or none |
| | NO: 186), | | | | | NO: 186), | | | |
| | or none | | | | | or none | | | |
| Endosperm | iMet | SpFdx | TPS | t-NOS (e.g | Embryo | iMet | SpFdx | PK | t-NOS (e.g |
| specific or | (SEQ ID | (SEQ ID | homolog | SEQ ID | specific or | (SEQ ID | (SEQ ID | | SEQ ID |
| preferential | NO: 111), | NO: 113 | | NO: 115), | preferential | NO: 111), | NO: 113 | | NO: 115), |
| (e.g. SEQ ID | iMADS3 | or 184) or | | t-OCS3 | (e.g. SEQ ID | iMADS3 | or 184) or | | t-OCS3 |
| NO: 106, 107, | (SEQ ID | ClmMD | | (e.g. SEQ | NO: 108, 141, | (SEQ ID | ClmMD | | (e.g. SEQ |
| or 189) | NO: 112), | (SEQ ID | | ID NO: | or 142) | NO: 112), | (SEQ ID | | ID NO: |
| | iAtc17 | NO: 138) | | 116), | | iAtc17 | NO: 138) | | 116), |
| | (SEQ ID | or none | | TOI3357 | | (SEQ ID | or none | | TOI3357 |
| | NO: 185), | | | (SEQ ID | | NO: 185), | | | (SEQ ID |
| | iAtss1 | | | NO: 187) | | iAtss1 | | | NO: 187) |
| | (SEQ ID | | | or none | | (SEQ ID | | | or none |
| | NO: 186), | | | | | NO: 186), | | | |
| | or none | | | | | or none | | | |
| Embryo | iMet | SpFdx | TPS | t-NOS (e.g | Constitutive | iMet | SpFdx | PK | t-NOS (e.g |
| specific or | (SEQ ID | (SEQ ID | homolog | SEQ ID | (e.g. SEQ ID | (SEQ ID | (SEQ ID | | SEQ ID |
| preferential | NO: 111), | NO: 113 | | NO: 115), | NO: 109 or 110 | NO: 111), | NO: 113 | | NO: 115), |
| (e.g. SEQ ID | iMADS3 | or 184) or | | t-OCS3 | or 188) | iMADS3 | or 184) or | | t-OCS3 |
| NO: 108, 141, | (SEQ ID | ClmMD | | (e.g. SEQ | | (SEQ ID | ClmMD | | (e.g. SEQ |
| or 142) | NO: 112), | (SEQ ID | | ID NO: | | NO: 112), | (SEQ ID | | ID NO: |
| | iAtc17 | NO: 138) | | 116), | | iAtc17 | NO: 138) | | 116), |
| | (SEQ ID | or none | | TOI3357 | | (SEQ ID | or none | | TOI3357 |
| | NO: 185), | | | (SEQ ID | | NO: 185), | | | (SEQ ID |
| | iAtss1 | | | NO: 187) | | iAtss1 | | | NO: 187) |
| | (SEQ ID | | | or none | | (SEQ ID | | | or none |
| | NO: 186), | | | | | NO: 186), | | | |
| | or none | | | | | or none | | | |
| Embryo | iMet | SpFdx | TPS | t-NOS (e.g | Whole seed | iMet | SpFdx | PK | t-NOS (e.g |
| specific or | (SEQ ID | (SEQ ID | homolog | SEQ ID | specific or | (SEQ ID | (SEQ ID | | SEQ ID |
| preferential | NO: 111), | NO: 113 | | NO: 115), | preferential | NO: 111), | NO: 113 | | NO: 115), |
| (e.g. SEQ ID | iMADS3 | or 184) or | | t-OCS3 | (e.g. SEQ ID | iMADS3 | or 184) or | | t-OCS3 |
| NO: 108, 141, | (SEQ ID | ClmMD | | (e.g. SEQ | NO: 104, 140, | (SEQ ID | ClmMD | | (e.g. SEQ |
| or 142) | NO: 112), | (SEQ ID | | ID NO: | 143, or 144) | NO: 112), | (SEQ ID | | ID NO: |
| | iAtc17 | NO: 138) | | 116), | | iAtc17 | NO: 138) | | 116), |
| | (SEQ ID | or none | | TOI3357 | | (SEQ ID | or none | | TOI3357 |
| | NO: 185), | | | (SEQ ID | | NO: 185), | | | (SEQ ID |
| | iAtss1 | | | NO: 187) | | iAtss1 | | | NO: 187) |
| | (SEQ ID | | | or none | | (SEQ ID | | | or none |
| | NO: 186), | | | | | NO: 186), | | | |
| | or none | | | | | or none | | | |
| Embryo | iMet | SpFdx | TPS | t-NOS (e.g | Endosperm | iMet | SpFdx | PK | t-NOS (e.g |
| specific or | (SEQ ID | (SEQ ID | homolog | SEQ ID | specific or | (SEQ ID | (SEQ ID | | SEQ ID |
| preferential | NO: 111), | NO: 113 | | NO: 115), | preferential | NO: 111), | NO: 113 | | NO: 115), |
| (e.g. SEQ ID | iMADS3 | or 184) or | | t-OCS3 | (e.g. SEQ ID | iMADS3 | or 184) or | | t-OCS3 |
| NO: 108, 141, | (SEQ ID | ClmMD | | (e.g. SEQ | NO: 106, 107, | (SEQ ID | ClmMD | | (e.g. SEQ |
| or 142) | NO: 112), | (SEQ ID | | ID NO: | or 189) | NO: 112), | (SEQ ID | | ID NO: |
| | iAtc17 | NO: 138) | | 116), | | iAtc17 | NO: 138) | | 116), |
| | (SEQ ID | or none | | TOI3357 | | (SEQ ID | or none | | TOI3357 |
| | NO: 185), | | | (SEQ ID | | NO: 185), | | | (SEQ ID |
| | iAtss1 | | | NO: 187) | | iAtss1 | | | NO: 187) |
| | (SEQ ID | | | or none | | (SEQ ID | | | or none |
| | NO: 186), | | | | | NO: 186), | | | |
| | or none | | | | | or none | | | |
| Embryo | iMet | SpFdx | TPS | t-NOS (e.g | Embryo | iMet | SpFdx | PK | t-NOS (e.g |
| specific or | (SEQ ID | (SEQ ID | homolog | SEQ ID | specific or | (SEQ ID | (SEQ ID | | SEQ ID |
| preferential | NO: 111), | NO: 113 | | NO: 115), | preferential | NO: 111), | NO: 113 | | NO: 115), |
| (e.g. SEQ ID | iMADS3 | or 184) or | | t-OCS3 | (e.g. SEQ ID | iMADS3 | or 184) or | | t-OCS3 |
| NO: 108, 141, | (SEQ ID | ClmMD | | (e.g. SEQ | NO: 108, 141, | (SEQ ID | ClmMD | | (e.g. SEQ |
| or 142) | NO: 112), | (SEQ ID | | ID NO: | or 142) | NO: 112), | (SEQ ID | | ID NO: |
| | iAtc17 | NO: 138) | | 116), | | iAtc17 | NO: 138) | | 116), |
| | (SEQ ID | or none | | TOI3357 | | (SEQ ID | or none | | TOI3357 |
| | NO: 185), | | | (SEQ ID | | NO: 185), | | | (SEQ ID |
| | iAtss1 | | | NO: 187) | | iAtss1 | | | NO: 187) |
| | (SEQ ID | | | or none | | (SEQ ID | | | or none |
| | NO: 186), | | | | | NO: 186), | | | |
| | or none | | | | | or none | | | |

[0435] 2.2 Vectors

[0436] Another aspect of the invention refers to a vector comprising the aforementioned expression cassette or a recombinant construct derived therefrom. The term “vector,” preferably, encompasses phage, plasmid, viral or retroviral vectors as well as artificial chromosomes, such as bacterial or yeast artificial chromosomes. Moreover, the term also relates to targeting constructs which allow for random or site-directed integration of the targeting construct into genomic DNA. Such target constructs, preferably, comprise DNA of sufficient length for either homologous or heterologous recombination. The vector encompassing the expression cassettes or recombinant constructs of the invention, preferably, further comprises selectable markers as described below for propagation and/or selection in a host. The vector may be incorporated into a host cell by various techniques well known in the art. If introduced into a host cell, the vector may reside in the cytoplasm or may be incorporated into the genome. In the latter case, it is to be understood that the vector may further comprise nucleic acid sequences which allow for homologous recombination or heterologous insertion.

[0437] Vectors can be introduced into prokaryotic or eukaryotic cells via conventional transformation or transfection techniques. The terms “transformation” and “transfection,” conjugation and transduction, as used in the present context, are intended to comprise a multiplicity of processes known in the art for introducing foreign nucleic acid (e.g., DNA) into a host cell, including, but not limited to, calcium phosphate, rubidium chloride or calcium chloride co-precipitation, DEAE-dextran-mediated transfection, lipofection, natural competence, carbon-based clusters, chemically mediated transfer, electroporation or particle bombardment (e.g., “gene-gun”). Suitable methods for the transformation or transfection of host cells, including plant cells, can be found in Sambrook et al. (Molecular Cloning: A Laboratory Manual, 2^{nd} ed., 1989, Cold Spring Harbor Laboratory, Cold Spring Harbor Laboratory Press, Cold Spring Harbor, N.Y.) and other laboratory manuals, such as Methods in Molecular Biology (Gartland and Davey eds., 1995, Vol. 44, Agrobacterium Protocols, Humana Press, Totowa, N.J.). Alternatively, a plasmid vector may be introduced by heat shock or electroporation techniques. Should the vector be a virus, it may be packaged in vitro using an appropriate packaging cell line prior to application to host cells. Retroviral vectors may be replication competent or replication defective. In the latter case, viral propagation generally will occur only in complementing host or host cells. Preferably, the vector referred to herein is suitable as a cloning vector, i.e. replicable in microbial systems. Such vectors ensure efficient cloning in bacteria and, preferably, yeasts or fungi and make possible the stable transformation of plants. Examples of suitable vectors include, but not limited to, various binary and co-integrated vector systems which are suitable for the T-DNA-mediated transformation as described herein. These vector systems, preferably, also comprise further cis-regulatory elements as described herein, such as selection markers or reporter genes.

[0438] 2.3 Vector Elements

[0439] Recombinant constructs and the vectors derived therefrom may comprise further functional elements. The term “functional element” is to be understood in the broad sense and means all those elements which have an effect on the generation, multiplication or function of the recombinant constructs, vectors or transgenic organisms according to the invention. Examples of such function elements include, but not limited to, selection marker genes, reporter genes, origins of replication, elements necessary for Agrobacterium-mediated transformation, and multiple cloning sites (MCS).

[0440] Selection marker genes are useful to select and separate successfully transformed cells. Preferably, within the method of the invention one marker may be employed for selection in a prokaryotic host, while another marker may be employed for selection in a eukaryotic host, particularly the plant species host. The marker may confer resistance against a biocide, such as antibiotics, toxins, heavy metals, or the like, or may function by complementation, imparting prototrophy to an auxotrophic host. Preferred selection marker genes for plants may include, but not limited to, negative selection markers, positive selection markers, and counter selection markers.

[0441] Negative selection markers include markers which confer a resistance to a biocidal compound such as a metabolic inhibitor (e.g., 2-deoxyglucose-6-phosphate, WO 98/45456), antibiotics (e.g., kanamycin, G418, bleomycin or hygromycin) or herbicides (e.g., phosphinothricin or glyphosate). Especially preferred negative selection markers are those which confer resistance to herbicides. These markers can be used, beside their function as a selection marker, to confer a herbicide resistance trait to the resulting transgenic plant. Examples of negative selection markers include, but not limited to
[0442] Phosphinothricin acetyltransferases (PAT; also named Bialophos resistance; bar; de Block et al., EMBO J., 1987, 6: 2513-2518; EP 0333033; U.S. Pat. No. 4,975,374);
[0443] 5-enolpyruvylshikimate-3-phosphate synthase (EPSPS; U.S. Pat. No. 5,633,435) or glyphosate oxidoreductase gene (U.S. Pat. No. 5,463,175) conferring resistance to Glyphosate (N-phosphonomethyl glycine) (Shah et al., Science, 1986, 233: 478);
[0444] Glyphosate degrading enzymes (Glyphosate oxidoreductase; gox);
[0445] Dalapon inactivating dehalogenases (deh);
[0446] Sulfonylurea- and imidazolinone-inactivating acetolactate synthases (for example mutated ALS variants with, for example, the S4 and/or Hra mutation);
[0447] Bromoxynil degrading nitrilases (bxn);
[0448] Kanamycin- or G418-resistance genes (NPTII or NPTI) coding for neomycin phosphotransferases (Fraley et al., Proc. Natl. Acad. Sci. USA, 1983, 80: 4803), which expresses an enzyme conferring resistance to the antibiotic kanamycin and the related antibiotics neomycin, paromomycin, gentamicin, and G418;
[0449] 2-Deoxyglucose-6-phosphate phosphatase (DOGR1-Gene product; WO 98/45456; EP 0807836) conferring resistance against 2-desoxyglucose (Randez-Gil et al., Yeast, 1995, 11: 1233-1240);
[0450] Hygromycin phosphotransferase (HPT), which mediates resistance to hygromycin (Vanden Elzen et al., Plant Mol. Biol., 1985, 5: 299); and
[0451] Dihydrofolate reductase (Eichholtz et al., Somatic Cell and Molecular Genetics, 1987, 13: 67-76).

[0452] Additional negative selection marker genes of bacterial origin that confer resistance to antibiotics include the aadA gene, which confers resistance to the antibiotic spectinomycin, gentamycin acetyl transferase, streptomycin phosphotransferase (SPT), aminoglycoside-3-adenyl transferase and the bleomycin resistance determinant (Svab et al., Plant Mol. Biol., 1990, 14: 197; Jones et al., Mol. Gen. Genet., 1987, 210: 86; Hille et al., Plant Mol. Biol., 1986, 7: 171; Hayford et al., Plant Physiol., 1988, 86: 1216). Other negative selection markers include those confer resistance against the toxic effects imposed by D-amino acids like e.g., D-alanine and D-serine (WO 03/060133; Erikson et al., Nat. Biotechnol., 2004, 22(4): 455-458), the daol gene encoding a D-amino acid oxidase (EC 1.4.3.3; GenBank Accession No. U60066) from Rhodotorula gracilis (Rhodosporidium toruloides), and the dsdA gene encoding a D-serine deaminase (EC 4.3.1.18; GenBank Accession No. J01603) from E. coli. Depending on the employed D-amino acid, the D-amino acid oxidase markers can be employed as dual function marker offering negative selection (e.g., when combined with for example D-alanine or D-serine) or counter selection (e.g., when combined with D-leucine or D-isoleucine).

[0453] Positive selection markers include markers which confer a growth advantage to a transformed plant in comparison with a non-transformed one. Genes like isopentenyltransferase from Agrobacterium tumefaciens (strain PO22; Genbank Accession No. AB025109) may, as a key enzyme of the cytokinin biosynthesis, facilitate regeneration of transformed plants (e.g., by selection on cytokinin-free medium). Corresponding selection methods are described in Ebinuma et al. (Proc. Natl. Acad. Sci. USA, 2000, 94: 2117-2121) and Ebinuma et al. (“Selection of marker-free transgenic plants using the oncogenes (ipt, rol A, B, C) of Agrobacterium as selectable markers,” 2000, in Molecular Biology of Woody Plants, Kluwer Academic Publishers). Additional positive selection markers, which confer a growth advantage to a transformed plant in comparison with a non-transformed one, are described in, for example, EP 0601092. Growth stimulation selection markers may include, but not limited to, β-glucuronidase (in combination with, for example, cytokinin glucuronide), mannose-6-phosphate isomerase (in combination with mannose), UDP-galactose-4-epimerase (in combination with, for example, galactose), wherein mannose-6-phosphate isomerase in combination with mannose is especially preferred.

[0454] Counter selection markers are especially suitable to select organisms with defined deleted sequences comprising said marker (Koprek et al., Plant J., 1999, 19(6): 719-726). Examples for counter selection marker include, but not limited to, thymidine kinases (TK), cytosine deaminases (Gleave et al., Plant Mol. Biol., 1999, 40(2): 223-35; Perera et al., Plant Mol. Biol., 1993, 23(4): 793-799; Stougaard, Plant J., 1993, 3: 755-761), cytochrom P450 proteins (Koprek et al., Plant J., 1999, 19(6): 719-726), haloalkan dehalogenases (Naested, Plant J., 1999, 18: 571-576), iaaH gene products (Sundaresan et al., Gene Develop., 1995, 9: 1797-1810), cytosine deaminase codA (Schlaman and Hooykaas, Plant J., 1997, 11: 1377-1385), and tms2 gene products (Fedoroff and Smith, Plant J., 1993, 3: 273-289).

[0455] Reporter genes encode readily quantifiable proteins and, via their color or enzyme activity, make possible an assessment of the transformation efficacy, the site of expression or the time of expression. Very especially preferred in this context are genes encoding reporter proteins (Schenborn and Groskreutz, Mol. Biotechnol., 1999, 13(1): 29-44) such as the green fluorescent protein (GFP) (Haseloff et al., Proc. Natl. Acad. Sci. USA, 1997, 94(6): 2122-2127; Sheen et al., Plant J., 1995, 8(5): 777-784; Reichel et al., Proc. Natl. Acad. Sci. USA, 1996, 93(12): 5888-5893; Chui et al., Curr. Biol., 1996, 6: 325-330; Leffel et al., Biotechniques, 1997, 23(5): 912-918; Tian et al., Plant Cell Rep., 1997, 16: 267-271; WO 97/41228), chloramphenicol transferase, a luciferase (Millar et al., Plant Mol. Biol. Rep., 1992, 10: 324-414; Ow et al., Science, 1986, 234: 856-859), the aequorin gene (Prasher et al., Biochem. Biophys. Res. Commun., 1985, 126(3): 1259-1268), β-galactosidase, R locus gene (encoding a protein which regulates the production of anthocyanin pigments (red coloring) in plant tissue and thus makes possible the direct analysis of the promoter activity without addition of further auxiliary substances or chromogenic substrates; see Dellaporta et al., 1988, In: Chromosome Structure and Function: Impact of New Concepts, 18th Stadler Genetics Symposium, 11: 263-282; Ludwig et al., Science, 1990, 247: 449), with β-glucuronidase (GUS) being very especially preferred (Jefferson, Plant Mol. Bio. Rep., 1987, 5: 387-405; Jefferson et al., EMBO J., 1987, 6: 3901-3907). β-glucuronidase (GUS) expression is detected by a blue color on incubation of the tissue with 5-bromo-4-chloro-3-indolyl-β-D-glucuronic acid, bacterial luciferase (LUX) expression is detected by light emission, firefly luciferase (LUC) expression is detected by light emission after incubation with luciferin, and galactosidase expression is detected by a bright blue color after the tissue was stained with 5-bromo-4-chloro-3-indolyl-β-D-galactopyranoside. Reporter genes may also be used as scorable markers as alternatives to antibiotic resistance markers. Such markers can be used to detect the presence or to measure the level of expression of the transferred gene. The use of scorable markers in plants to identify or tag genetically modified cells works well when efficiency of modification of the cell is high. Origins of replication which ensure amplification of the recombinant constructs or vectors according to the invention in, for example, E. coli. Examples of suitable origins of replication include, but not limited to, ORI (origin of DNA replication), the pBR322 on or the P15A ori (Sambrook et al., Molecular Cloning: A Laboratory Manual, 2^{nd} ed., Cold Spring Harbor Laboratory, Cold Spring Harbor Laboratory Press, Cold Spring Harbor, N.Y., 1989). Additional examples for replication systems functional in E. coli, are ColE1, pSC101, pACYC184, or the like. In addition to or in place of the E. coli replication system, a broad host range replication system may be employed, such as the replication systems of the P-1 Incompatibility plasmids, e.g., pRK290. These plasmids are particularly effective with armed and disarmed Ti-plasmids for transfer of T-DNA to the plant host.

[0456] Other functional elements may be included in the recombinant constructs and the vector derived therefrom of the invention include, but not limited to, other genetic control elements for excision of the inserted sequences from the genome, elements necessary for Agrobacterium-mediated transformation, and multiple cloning sites (MCS).

[0457] Other genetic control elements for excision permit removal of the inserted sequences from the genome. Methods based on the crc/lox (Dale and Ow, Proc. Natl. Acad. Sci. USA, 1991, 88: 10558-10562; Sauer, Methods, 1998, 14(4): 381-392; Odell et al., Mol. Gen. Genet., 1990, 223: 369-378), FLP/FRT (Lysnik et al., Nucleic Acid Research, 1993, 21: 969-975), or Ac/Ds system (Lawson et al., Mol. Gen. Genet., 1994, 245: 608-615; Wader et al., in Tomato Technology (Alan R. Liss, Inc.), 1987, pp. 189-198; U.S. Pat. No. 5,225,341; Baker et al., EMBO J., 1987, 6: 1547-1554) permit removal of a specific DNA sequence from the genome of the host organism, if appropriate, in a tissue-specific and/or inducible manner. In this context, the control sequences may mean the specific flanking sequences (e.g., lox sequences) which later allow removal (e.g., by means of ere recombinase) of a specific DNA sequence.

[0458] Elements necessary for Agrobacterium-mediated transformation may include, but not limited to, the right and/or, optionally, left border of the T-DNA or the vir region.

[0459] Multiple cloning sites (MCS) can be included in the recombinant construct or the vector of the invention to enable and facilitate the insertion of one or more nucleic acid sequences.

[0460] 2.4 Vectors for Plant Transformation

[0461] If Agrobacteria are used for plant transformation, the recombinant construct is to be integrated into specific plasmid vectors, either into a shuttle or intermediate vector, or into a binary vector. If a Ti or Ri plasmid is to be used for the transformation, at least the right border, but in most cases the right and the left border, of the Ti or Ri plasmid T-DNA is flanking the region with the recombinant construct to be introduced into the plant genome. Preferably, binary vectors for the Agrobacterium transformation can be used. Binary vectors are capable of replicating both in E. coli and in Agrobacterium. They preferably comprise a selection marker gene and a linker or polylinker flanked by the right and, optionally, left T-DNA border sequence. They can be transformed directly into Agrobacterium (Holsters et al., Mol. Gen. Genet., 1978, 163: 181-187). A selection marker gene may be included in the vector which permits a selection of transformed Agrobacteria (e.g., the nptIII gene). The Agrobacterium, which acts as host organism in this case, may already comprise a disarmed (i.e. non-oncogenic) plasmid with the vir region for transferring the T-DNA to the plant cell. The use of T-DNA for the transformation of plant cells has been studied and described extensively (e.g., EP 0120516; Hoekema, In: The Binary Plant Vector System, Offsetdrukkerij Kanters B.V., Alblasserdam, Chapter V; An et al., EMBO J., 1985, 4: 277-287). A variety of binary vectors are known and available for transformation using Agrobacterium, such as, for example, pBI101.2 or pBIN19 (Clontech Laboratories, Inc. USA; Bevan et al., Nucl. Acids Res., 1984, 12: 8711), pBinAR, pPZP200 or pPTV.

[0462] Transformation can also be realized without the use of Agrobacterium. Non-Agrobacterium transformation circumvents the requirement for T-DNA sequences in the chosen transformation vector and consequently vectors lacking these sequences can be utilized in addition to vectors such as the ones described above which contain T-DNA sequences. Transformation techniques that do not rely on Agrobacterium include, but not limited to, transformation via particle bombardment, protoplast uptake (e.g., PEG and electroporation) and microinjection, all are well known in the art. The choice of vector depends largely on the preferred selection for the species being transformed. Typical vectors suitable for non-Agrobacterium transformation include pCIB3064, pSOG19, and pSOG35 (see e.g., U.S. Pat. No. 5,639,949).

3. Introduction of Expression Cassette into Cells and Organisms

[0463] The aforementioned expression cassettes, or the recombinant constructs or vectors derived therefrom, can be introduced into a cell or an organism in various ways known to the skilled worker. “To introduce” is to be understood in the broad sense and comprises, for example, all those methods suitable for directly or indirectly introducing a DNA or RNA molecule into an organism or a cell, compartment, tissue, organ or seed of same, or generating it therein. The introduction can bring about either a transient presence or a stable presence of such a DNA or RNA molecule in the cell or organism.

[0464] Thus, a further aspect of the invention relates to cells and organisms (e.g., plants, plant cells, microorganisms, bacteria, etc.), which comprise at least one expression cassette of the invention, or a recombinant construct or a vector derived therefrom. In certain embodiments, the cell is suspended in culture, while in other embodiments the cell is in, or in part of, a whole organism, such as a microorganism or a plant. The cell can be prokaryotic or of eukaryotic nature. For plants and plant cells, preferably, the expression cassette or recombinant construct is integrated into the genomic DNA, more preferably within the chromosomal or plastidic DNA, most preferably in the chromosomal DNA of the cell. For microorganisms, the expression cassette or recombinant construct is preferably incorporated into a plasmid, which is then introduced into the microorganism. Accordingly, in one embodiment, the present invention relates to a transformed plant cell, plant or part thereof, comprising in its genome at least one stably incorporated expression cassette of the present invention, or a recombinant construct or a vector derived therefrom. In another embodiment, the present invention relates to a transformed microorganism comprising a plasmid containing the expression cassette or recombinant construct of the present invention.

[0465] Preferred prokaryotic cells include mainly bacteria such as bacteria of the genus Escherichia, Corynebacterium, Bacillus, Clostridium, Proionibacterium, Butyrivibrio, Eubacterium, Lactobacillus, Erwinia, Agrobacterium, Flavobacterium, Alcaligenes, Phaeodactylum, Colpidium, Mortierella, Entomophthora, Mucor, Crypthecodinium or Cyanobacteria, for example of the genus Synechocystis. Microorganisms which are preferred are mainly those which are capable of infecting plants and thus of transferring the expression cassette or construct of the invention. Preferred microorganisms are those of the genus Agrobacterium and in particular the species Agrobacterium tumefaciens and Agrobacterium rhizogenes.

[0466] Eukaryotic cells and organisms comprise plant and animal (preferably non-human) organisms and/or cells and eukaryotic microorganisms such as, for example, yeasts, algae or fungi. Preferred fungi include Aspergillus, Trichoderma, Ashbya, Neurospora, Fusarium, Beauveria or those described in Indian Chem. Engr., Section B., 1995, 37(1,2): 15, Table 6. Especially preferred is the filamentous Hemiascomycete Ashbya gossypii. Preferred yeasts include Candida, Saccharomyces, Hansenula or Pichia, especially preferred are Saccharomyces cerevisiae or Pichia pastoris (ATCC Accession No. 201178). Preferred eukaryotic cells or organisms comprise plant cells and/or organisms, or eukaryotic microorganisms. A corresponding transgenic organism can be generated for example by introducing a desired expression system into a cell derived from such an organism by ways and methods known in the art.

[0467] The “plant” as used herein encompasses whole plants, ancestors and progeny of the plants and plant parts, including seeds, shoots, stems, leaves, roots (including tubers), flowers, and tissues and organs, wherein each of the aforementioned comprise the gene/nucleic acid of interest. The term “plant” may also include parts of plants, such as pollen, flowers, kernels, ears, cobs, leaves, husks, stalks, and the like. The term “plant” also encompasses plant cells, plant protoplasts, plant cell tissue cultures, callus tissue, embryos, meristematic regions, gametophytes, sporophytes, pollen and microspores, gamete producing cells, and a cell that regenerates into a whole plant, again wherein each of the aforementioned comprises the gene/nucleic acid of interest.

[0468] Plants that are particularly useful in the present invention include all plants which belong to the superfamily Viridiplantae, in particular monocotyledonous and dicotyledonous plants including fodder or forage legumes, ornamental plants, food crops, trees, shrubs, or algae selected from the list comprising Acer spp., Actinidia spp., Abelmoschus spp., Agave sisalana, Agropyron spp., Agrostis stolonifera, Allium spp., Amaranthus spp., Ammophila arenaria, Ananas comosus, Annona spp., Apium graveolens, Arachis spp, Artocarpus spp., Asparagus officinalis, Avena spp. (e.g. Avena saliva, Avena fatua, Avena byzantina, Avena fatua var. saliva, Avena hybrida), Averrhoa carambola, Bambusa sp., Benincasa hispida, Bertholletia excelsea, Beta vulgaris, Brassica spp. (e.g. Brassica napus, Brassica rapa ssp. [canola, oilseed rape, turnip rape]), Cadaba farinosa, Camellia sinensis, Canna indica, Cannabis saliva, Capsicum spp., Carex elata, Carica papaya, Carissa macrocarpa, Carya spp., Carthamus tinctorius, Castanea spp., Ceiba pentandra, Cichorium endivia, Cinnamomum spp., Citrullus lanatus, Citrus spp., Cocos spp., Coffea spp., Colocasia esculenta, Cola spp., Corchorus sp., Coriandrum sativum, Corylus spp., Crataegus spp., Crocus sativus, Cucurbita spp., Cucumis spp., Cynara spp., Daucus carota, Desmodium spp., Dimocarpus longan, Dioscorea spp., Diospyros spp., Echinochloa spp., Elaeis (e.g. Elaeis guineensis, Elaeis oleifera), Eleusine coracana, Erianthus sp., Eriobotrya japonica, Eucalyptus sp., Eugenia uniflora, Fagopyrum spp., Fagus spp., Festuca arundinacea, Ficus carica, Fortunella spp., Fragaria spp., Ginkgo biloba, Glycine spp. (e.g. Glycine max, Soja hispida or Soja max), Gossypium hirsutum, Helianthus spp. (e.g. Helianthus annuus), Hemerocallis fulva, Hibiscus spp., Hordeum spp. (e.g. Hordeum vulgare), Ipomoea batatas, Jatropha curcas, Juglans spp., Lactuca sativa, Lathyrus spp., Lens culinaris, Lesquerella fendleri (Gray) Wats, Linum usitatissimum, Litchi chinensis, Lotus spp., Luffa acutangula, Lupinus spp., Luzula sylvatica, Lycopersicon spp. (e.g. Lycopersicon esculenturn, Lycopersicon lycopersicum, Lycopersicon pyriforme), Macrotyloma spp., Malus spp., Malpighia emarginata, Mammea americana, Mangifera indica, Manihot spp., Manilkara zapota, Medicago sativa, Melilotus spp., Mentha spp., Miscanthus sinensis, Momordica spp., Morus nigra, Musa spp., Nicotiana spp., Olea spp., Opuntia spp., Ornithopus spp., Oryza spp. (e.g. Oryza sativa, Oryza latifolia), Panicum miliaceum, Panicum virgatum, Passiflora edulis, Pastinaca sativa, Pennisetum sp., Persea spp., Petroselinum crispum, Phalaris arundinacea, Phaseolus spp., Phleum pratense, Phoenix spp., Phragmites australis, Physalis spp., Pinus spp., Pistacia vera, Pisum spp., Poa spp., Populus spp., Prosopis spp., Prunus spp., Psidium spp., Punica granatum, Pyrus communis, Quercus spp., Raphanus sativus, Rheum rhabarbarum, Ribes spp., Ricinus communis, Rubus spp., Saccharum spp., Salix sp., Sambucus spp., Secale cereale, Sesamum spp., Sinapis sp., Solanum spp. (e.g. Solanum tuberosum, Solanum integrifolium or Solanum lycopersicum), Sorghum bicolor, Sorghum halepense, Spinacia spp., Syzygium spp., Tageles spp., Tamarindus indica, Theobroma cacao, Trifolium spp., Triticosecale rimpaui, Triticum spp. (e.g. Triticum aestivum, Triticum durum, Triticum turgidum, Triticum hybernum, Triticum macha, Triticum sativum or Triticum vulgare), Tropaeolum minus, Tropaeolum majus, Vaccinium spp., Vicia spp., Vigna spp., Viola odorata, Vitis spp., Zea mays, Zizania palustris, Ziziphus spp., Cyclotella cryptica, Navicula saprophila, Synechococcus 7002 and Anabaena 7120, Chlorella protothecoides, Dunaliella salina, Chlorella spp, Dunaliella tertiolecta, Gracilaria, Sargassum, Pleurochrisis carterae, Laminaria 3840 hyperbore, Laminaria saccharina, Gracialliaria, Sargassum, Botryccoccus braunii, Arthospira platensis, amongst others. Especially preferred are rice, oilseed rape, canola, soybean, corn (maize), cotton, sugarcane, micro algae, alfalfa, sorghum, and wheat.

[0469] “Plant tissue” includes differentiated and undifferentiated tissues or plants, including but not limited to roots, stems, shoots, leaves, pollen, seeds, tumor tissue and various forms of cells and culture such as single cells, protoplast, embryos, and callus tissue. The plant tissue may be in plants or in organ, tissue or cell culture.

[0470] Preferably, the organisms are plant organisms. Preferred plants are selected in particular from among crop plants. More preferred plants include, but not limited to, maize, soybean, barley, alfalfa, sunflower, flax, linseed, oilseed rape, canola, sesame, safflower (Carthamus tinctorius), olive tree, peanut, castor-oil plant, oil palm, cacao shrub, or various nut species such as, for example, walnut, coconut or almond, soybean, cotton, peanut, sorghum, tobacco, sugarbeet, sugarcane, rice, wheat, rye, turfgrass, millet, sugarcane, tomato, or potato.

[0471] It is noted that a plant need not be considered a “plant variety” simply because it contains stably within its genome a transgene, introduced into a cell of the plant or an ancestor thereof. In addition to a plant, the present invention provides any clone of such a plant, seed, selfed or hybrid progeny and descendants, and any part or propagule of any of these, such as cuttings and seed, which may be used in reproduction or propagation, sexual or asexual. Also encompassed by the invention is a plant which is a sexually or asexually propagated offspring, progeny, clone or descendant of such a plant, or any part or propagule of said plant, offspring, clone or descendant. Genetically modified plants according to the invention, which can be consumed by humans or animals, can also be used as food or feedstuffs, for example directly or following processing known in the art, or be used in biofuel production. The present invention also provides for parts of the organism especially plants, particularly reproductive or storage parts. Plant parts, without limitation, include seed, endosperm, ovule, pollen, roots, tubers, stems, leaves, stalks, fruit, berries, nuts, bark, pods, seeds and flowers.

[0472] The expression cassette of the invention, or a recombinant construct or vector derived therefrom, is typically introduced or administered in an amount that allows delivery of at least one copy per cell. Higher amounts (for example at least 5, 10, 100, 500 or 1000 copies per cell) can, if appropriate, result in a more efficient phenotype (e.g., higher expression or higher suppression of the target gene). The amount of the expression cassette, recombinant construct, or vector administered to a cell, tissue, or organism depends on the nature of the cell, tissue, or organism, the nature of the target gene, and the nature of the expression cassette, recombinant construct, or vector, and can readily be optimized to obtain the desired level of expression or inhibition.

[0473] Preferably at least about 100 molecules, preferably at least about 1000, more preferably at least about 10,000 of the expression cassette, recombinant construct, or vector, most preferably at least about 100,000 of the expression cassette, recombinant construct, or vector are introduced. In the case of administration of the expression cassette, recombinant construct, or vector to a cell culture or to cells in tissue, by methods other than injection, for example by soaking, electroporation, or lipid-mediated transfection, the cells are preferably exposed to similar levels of the expression cassette, recombinant construct, or vector in the medium.

[0474] For example, the expression cassette, recombinant construct, or vector of the invention may be introduced into cells via transformation, transfection, injection, projection, conjugation, endocytosis, and phagocytosis, all are well known in the art. Preferred methods for introduction include, but not limited to:

[0475] (a) methods of direct or physical introduction of the expression cassette, recombinant construct, or vector of the invention into the target cell or organism, and

[0476] (b) methods of indirect introduction of the expression cassette, recombinant construct, or vector of the invention into the target cell or organism by, for example, a first introduction of a recombinant construct and a subsequent intracellular expression.

### 4. Plant Transformation Techniques

[0477] In a further embodiment, the invention provides a method of producing a transgenic plant, plant cell, or plant part comprising:

[0478] (a) transforming a plant, plant cell, or plant part with at least one aforementioned expression cassettes, or a recombinant construct or vector derived therefrom, and

[0479] (b) optionally regenerating from the plant cell or plant part a transgenic plant.

A variety of methods for introducing nucleic acid sequences (e.g., vectors) into the genome of plants and for the regeneration of plants from plant tissues or plant cells are known in the art (Plant Molecular Biology and Biotechnology, Chapter 6-7, pp. 71-119, CRC Press, Boca Raton, Fla., 1993; White F. F., “Vectors for Gene Transfer in Higher Plants,” in Transgenic Plants, Vol. 1, Engineering and Utilization, Kung and Wu, eds., Academic Press, pp. 15-38, 1993; Jenes et al., “Techniques for Gene Transfer,” in Transgenic Plants, Vol. 1, Engineering and Utilization, Kung and Wu, eds., Academic Press, pp. 128-143, 1993; Potrykus, Annu. Rev. Plant Physiol. Plant Mol. Biol., 1991, 42:205-225; Halford et al., Br. Med. Bull., 2000, 56(1): 62-73).

[0480] 4.1 Non-Agrobacterium Transformation

[0481] Transformation methods may include direct and indirect methods of transformation. Suitable direct methods include, but not limited to, polyethylene glycol induced DNA uptake, liposome-mediated transformation (U.S. Pat. No. 4,536,475), biolistic methods using the gene gun (Fromm et al., Bio/Technology, 1990, 8(9): 833-839; Gordon-Kamm et al., Plant Cell, 1990, 2: 603), electroporation, incubation of dry embryos in DNA-comprising solution, and microinjection. In the case of these direct transformation methods, the plasmid used need not meet any particular requirements. Simple plasmids, such as those of the pUC series, pBR322, M13mp series, pACYC184 and the like can be used. If intact plants are to be regenerated from the transformed cells, an additional selectable marker gene is preferably located on the plasmid. The direct transformation techniques are equally suitable for dicotyledonous and monocotyledonous plants.

[0482] 4.2 Agrobacterium Transformation

[0483] Transformation can also be carried out by bacterial infection by means of Agrobacterium (for example EP 0116718), viral infection by means of viral vectors (EP 0067553; U.S. Pat. No. 4,407,956; WO 95/34668; WO 93/03161) or by means of pollen (EP 0270356; WO 85/01856; U.S. Pat. No. 4,684,611). Agrobacterium based transformation techniques (especially for dicotyledonous plants) are well known in the art. The Agrobacterium strain (e.g., Agrobacterium tumefaciens or Agrobacterium rhizogenes) comprises a plasmid (Ti or Ri plasmid) and a T-DNA element which is transferred to the plant following infection with Agrobacterium. The T-DNA (transferred DNA) is integrated into the genome of the plant cell. The T-DNA may be localized on the Ri- or Ti-plasmid or is separately comprised in a so-called binary vector. Methods for the Agrobacterium-mediated transformation are described, for example, in Horsch et al., Science, 1985, 227: 1229-1231. The Agrobacterium-mediated transformation is best suited to dicotyledonous plants but has also been adopted to monocotyledonous plants. The transformation of plants by Agrobacteria is described in, for example, White F. F., “Vectors for Gene Transfer in Higher Plants,” in Transgenic Plants, Vol. 1, Engineering and Utilization, Kung and Wu, eds., Academic Press, pp. 15-38, 1993; Jenes et al., “Techniques for Gene Transfer,” in Transgenic Plants, Vol. 1, Engineering and Utilization, Kung and Wu, eds., Academic Press, pp. 128-143, 1993; Potrykus, Annu. Rev. Plant Physiol. Plant Mol. Biol., 1991, 42: 205-225.

[0484] Transformation may result in transient or stable transformation and expression. Although an expression cassette of the present invention can be inserted into any plant and plant cell falling within these broad classes, it is particularly useful in crop plant cells.

[0485] Various tissues are suitable as starting material (explant) for the Agrobacterium-mediated transformation process including, but not limited to, callus (U.S. Pat. No. 5,591,616; EP 604662), immature embryos (EP 672752), pollen (U.S. Pat. No. 5,929,300), shoot apex (U.S. Pat. No. 5,164,310 or in planta transformation (U.S. Pat. No. 5,994,624). The method and material described herein can be combined with Agrobacterium mediated transformation methods known in the art.

[0486] 4.3 Plastid Transformation

[0487] In another embodiment, the expression cassette or recombinant construct is directly transformed into the plastid genome. Plastid expression, in which genes are inserted by homologous recombination into the several thousand copies of the circular plastid genome present in each plant cell, takes advantage of the enormous copy number advantage over nuclear-expressed genes to permit high expression levels. In one embodiment, the nucleotide sequence is inserted into a plastid targeting vector and transformed into the plastid genome of a desired plant host. Plants homoplasmic for plastid genomes containing the nucleotide sequence are obtained, and are preferentially capable of high expression of the nucleotide sequence.

[0488] Plastid transformation technology is extensively described in, for example, U.S. Pat. No. 5,451,513, U.S. Pat. No. 5,545,817, U.S. Pat. No. 5,545,818, U.S. Pat. No. 5,877,462, WO 95/16783, WO 97/32977, and in McBride et al., Proc. Natl. Acad. Sci. USA, 1994, 91: 7301-7305. The basic technique for plastid transformation involves introducing regions of cloned plastid DNA flanking a selectable marker together with the nucleotide sequence into a suitable target tissue, e.g., using biolistic or protoplast transformation (e.g., calcium chloride or PEG mediated transformation). The 1 to 1.5 kb flanking regions, termed targeting sequences, facilitate homologous recombination with the plastid genome and thus allow the replacement or modification of specific regions of the plastome. Initially, point mutations in the chloroplast 16S rRNA and rps12 genes conferring resistance to spectinomycin and/or streptomycin are utilized as selectable markers for transformation (Svab et al., Proc. Natl. Acad. Sci. USA, 1990, 87: 8526-8530; Staub et al., Plant Cell, 1992, 4: 39-45). The presence of cloning sites between these markers allowed creation of a plastid targeting vector for introduction of foreign genes (Staub et al., EMBO J., 1993, 12: 601-606). Substantial increases in transformation frequency are obtained by replacement of the recessive rRNA or r-protein antibiotic resistance genes with a dominant selectable marker, the bacterial aadA gene encoding the spectinomycin-detoxifying enzyme aminoglycoside-3′-adenyltransferase (Svab et al., Proc. Natl. Acad. Sci. USA, 1993, 90: 913-917). Other selectable markers useful for plastid transformation are known in the art and encompassed within the scope of the invention.

### 5. Selection and Regeneration Techniques

[0489] To select cells which have successfully undergone transformation, it is preferred to introduce a selectable marker which confers, to the cells which have successfully undergone transformation, a resistance to a biocide (for example a herbicide), a metabolism inhibitor such as 2-deoxyglucose-6-phosphate (WO 98/45456) or an antibiotic. The selection marker permits the transformed cells to be selected from untransformed cells (McCormick et al., Plant Cell Reports, 1986, 5: 81-84). Suitable selection markers are described above.

[0490] Transgenic plants can be regenerated in the known manner from the transformed cells. The resulting plantlets can be planted and grown in the customary manner. Preferably, two or more generations should be cultured to ensure that the genomic integration is stable and hereditary. Suitable methods are described in, for example, Fennell et al., Plant Cell Rep., 1992, 11:567-570; Stoeger et al., Plant Cell Rep., 1995, 14: 273-278; and Jahne et al., Theor. Appl. Genet., 1994, 89: 525-533.

### 6. Biotechnological Applications

[0491] The expression cassettes, and recombinant constructs and vectors derived therefrom, can be used to manipulate the production of protein, oils, and/or amino acids and the like in a plant, plant cell, or plant part. The invention, in one embodiment, provides a method for increasing the content of one or more of protein, oil or one or more amino acids in a plant, plant cell, or plant part relative to a corresponding wild-type plant, plant cell, or plant part, comprising:

[0492] (a) obtaining a plant, plant cell, or plant part comprising at least one aforementioned expression cassette, or at least one recombinant construct or vector derived therefrom, and

[0493] (b) selecting a plant, plant cell, or plant part with increased content in one or more of protein, oil, or one or more amino acids.

[0494] Preferably, expression of the nucleic acid molecule comprised in the aforementioned expression cassettes in the transformed and/or regenerated transgenic plant, plant cell, or plant part increases the protein, oil, and/or amino acid content of the transgenic plant, plant cell, or plant part, as compared to a corresponding wild-type plant, plant cell, or plant part. Methods of transforming a plant, plant cell, or plant part, selecting a transformed plant, plant cell, or plant part, and regenerating a plant from a plant cell or plant part are well known to one skilled in the art in view of the disclosure herein above.

[0495] Increases in protein, oil and/or amino acid content can be assessed by various methods known to one skilled in the art.

[0496] Plants suitable for the use in the methods of the invention can be monocotyledonous or dicotyledonous plants. In a preferred embodiment, the plant is a monocotyledonous plant, and more preferably, a maize plant, or the plant cell or plant part is from a monocotyledonous plant, preferably a maize plant.

[0497] The plant, plant cell, or plant part that is obtained from the aforementioned methods can be used for production of food, feed, a food supplement, or a feed supplement. Accordingly, in a further embodiment, the present invention relates to the use of the plant, plant cell, or plant part obtained according to the aforementioned methods for the preparation of a food or feed composition or a composition intended for use as a food or feed supplement. The invention further relates to a method of producing a food or feed composition intended for animal or livestock feed comprising the plant, plant cell, or plant part obtained according to the aforementioned methods, and to the composition intended for animal or livestock feed thus obtained. In a preferred embodiment, said plant is a monocotyledonous plant, and more preferably, a maize plant, or the plant cell or plant part is from a monocotyledonous plant, preferably a maize plant.

[0498] In one embodiment, the plants, seed, or grain of the invention are used for production of human food, animal or livestock feed, as raw material in industry, pet foods, and food products. Such products can provide increased nutrition because of the increased nutrient value. In a further embodiment, the present invention also relates to animal feed which is formulated for a specific animal type, for example, as in U.S. Pat. No. 6,774,288, which is hereby incorporated by reference in its entirety. The seed or grain with increased content in one or more of protein, oil, or one or more amino acids may be seed or grain from any crop species including a high protein maize, for example, as in U.S. Pat. No. 6,774,288, which is hereby incorporated by reference in its entirety. The animal feed may be used for feeding non ruminant animals, such as swine, poultry, horses, or sheep, small companion animals such as cats or dogs, and fish such as tilapia or salmon. For example, maize is used extensively as livestock feed, primarily for beef cattle, dairy cattle, hogs, and poultry. See, for example, U.S. Pat. No. 7,087,261, U.S. Pat. No. 6,774,288, and US 2005/0246791.

### 7. Plant Breeding

[0499] 7.1 Traditional Breeding Methods

[0500] The plants and plant parts obtained from the aforementioned methods can also be used in a plant breeding program. In one embodiment, the invention relates to methods for producing a maize plant by crossing a first parent maize plant with a second parent maize plant wherein either the first or second parent maize plant comprises an expression cassette or recombinant construct described herein. The other parent may be any other maize plant, such as another inbred line or a plant that is part of a cultivated or natural population. Any plant breeding method may be used, including but not limited to selfing, sibbing, backcrossing, recurrent selection, mass selection, pedigree breeding, double haploids, bulk selection, hybrid production, crosses to populations, and the like. These methods are well known in the art.

[0501] For example, pedigree breeding is used commonly for the improvement of self-pollinating crops or inbred lines of cross-pollinating crops. Pedigree breeding starts with the crossing of two genotypes, such as a first inbred line comprising an expression cassette or recombinant construct described herein and a second elite inbred line having one or more desirable characteristics that is lacking or which complements the first inbred line. If the two original parents do not provide all the desired characteristics, other sources can be included in the breeding population. In the pedigree method, superior plants are selfed and selected in successive filial generations. In the succeeding filial generations the heterozygous condition gives way to homogeneous lines as a result of self-pollination and selection.

[0502] Mass and recurrent selections can be used to improve populations of either self- or cross-pollinating crops. A genetically variable population of heterozygous individuals is either identified or created by intercrossing several different parents. The best plants are selected based on individual superiority, outstanding progeny, or excellent combining ability. The selected plants are intercrossed to produce a new population in which further cycles of selection are continued.

[0503] Backcross breeding has been used to transfer genes for a simply inherited, highly heritable trait into a desirable homozygous cultivar or inbred line that is the recurrent parent. The source of the trait to be transferred is called the donor parent. The resulting plant is expected to have the attributes of the recurrent parent (e.g., cultivar) and the desirable trait transferred from the donor parent. After the initial cross, individuals possessing the phenotype of the donor parent are selected and repeatedly crossed (backcrossed) to the recurrent parent. The resulting plant is expected to have the attributes of the recurrent parent (e.g., cultivar) and the desirable trait transferred from the donor parent.

[0504] Several different physiological and morphological characteristics can be selected for as attributes of the recurrent parent in a backcross breeding program, including days to maturity (e.g. days from emergence to 50% of plants in silk or 50% of plants in pollen), plant height, ear height, average length of top ear internode, average number of tillers, average number of ears per stalk, anthocyanin content of brace roots, width of ear node leaf, length of ear node leaf, number of leaves above top ear, leaf angle from second leaf above ear at anthesis to stalk above leaf, leaf color, leaf sheath pubescence, leaf marginal waves, leaf longitudinal creases, number of lateral branches on tassel, branch angle from central spike of tassel, tassel length, pollen shed, anther color, glume color, bar glumes, ear silk color, fresh husk color, dry husk color, position of ear, husk tightness, husk extension, ear length, ear diameter at mid-point, ear weight, number of kernel rows, kernel rows, row alignment, shank length, ear taper, kernel length, kernel width, kernel thickness, kernel shape, aleurone color pattern, aleurone color, hard endosperm color, endosperm type, weight per 100 kernels, cob diameter at mid-point, cob color, and agronomic traits such as stay green (late season plant health), dropped ears (percentage of plants that dropped an ear prior to harvest), pre-anthesis brittle snapping (stalk breaking near the time of pollination), pre-anthesis root lodging (lean from the vertical axis at an approximate 30° angle or greater near the time of pollination), and post-anthesis root lodging.

[0505] 7.2 Breeding with Molecular Markers

[0506] Molecular markers, which includes markers identified through the use of techniques such as Isozyme Electrophoresis, Restriction Length Polymorphisms (RFLPs), Randomly Amplified Polymorphic DNAs (RAPDs), Arbitrarily Primed Polymerase Chain Reaction (AP-PCR), DNA Amplification Fingerprinting (DAF), Sequence Characterized Amplified Regions (SCARS), Amplified Fragment Length Polymorphisms (AFLPs), Simple Sequence Repeats (SSRs), and Single Nucleotide Polymorphisms (SNPs), may be used in plant breeding methods utilizing the inbred of the present invention. Molecular markers can be used to identify the unique genetic composition of the invention and progeny lines retaining that unique genetic composition. Various molecular marker techniques may be used in combination to enhance overall resolution.

[0507] One use of molecular markers is Quantitative Trait Loci (QTL) mapping. QTL mapping is the use of markers, which are known to be closely linked to alleles that have measurable effects on a quantitative trait. Selection in the breeding process is based upon the accumulation of markers linked to the positive effecting alleles and/or elimination of the markers linked to the negative effecting alleles from the plant's genome.

[0508] Molecular markers can also be used during the breeding process for the selection of qualitative traits. For example, markers closely linked to alleles or markers containing sequences within the actual alleles of interest can be used to select plants that contain the alleles of interest during a backcrossing breeding program. The markers can also be used to select for the genome of the recurrent parent and can minimize the amount of genome from the donor parent that remains in the selected plants. It can also be used to reduce the number of crosses back to the recurrent parent needed in a backcrossing program. The use of molecular markers in the selection process is often called genetic marker enhanced selection.

[0509] Descriptions of breeding methods can also be found in one of several reference books (e.g., Allard, Principles of Plant Breeding, 1960; Simmonds, Principles of Crop Improvement, 1979; Fehr, “Breeding Methods for Cultivar Development”, Production and Uses, 2nd ed., Wilcox editor, 1987). See also U.S. Pat. No. 7,183,470 and U.S. Pat. No. 7,339,097, the disclosures of which are expressly incorporated herein by reference.

[0510] 7.3 Maize Hybrids

[0511] A single cross maize hybrid results from the cross of two inbred lines, each of which has a genotype that complements the genotype of the other. The hybrid progeny of the first generation is designated F1. In the development of commercial hybrids in a maize plant breeding program, only the F1 hybrid plants are sought. F1 hybrids are more vigorous than their inbred parents. This hybrid vigor, or heterosis, can be manifested in many polygenic traits, including increased vegetative growth and increased yield.

[0512] An inbred maize line comprising at least one expression cassette or recombinant construct described herein may be used to produce hybrid maize. One such embodiment is the method of crossing the inbred maize line comprising at least one expression cassette or recombinant construct of the invention with another maize plant, such as a different maize inbred line, to form a first generation F1 hybrid seed. The first generation F1 hybrid seed, plant and plant part produced by this method is an embodiment of the invention. The first generation F1 seed, plant and plant part will comprise an essentially complete set of the alleles of the inbred line comprising an expression cassette or recombinant construct described herein. One of ordinary skill in the art can utilize either breeder books or molecular methods to identify a particular F1 hybrid plant produced using the inbred line comprising at least one expression cassette or recombinant construct described herein. Further, one of ordinary skill in the art may also produce F1 hybrids with transgenic, male sterile and/or backcross conversions of the inbred line comprising at least one expression cassette or recombinant construct described herein.

[0513] The development of a maize hybrid in a maize plant breeding program involves three steps: (1) the selection of plants from various germplasm pools for initial breeding crosses; (2) the selfing of the selected plants from the breeding crosses for several generations to produce a series of inbred lines, such as an inbred line comprising at least one expression cassette or recombinant construct described herein, which, although different from each other, breed true and are highly uniform; and (3) crossing the selected inbred lines with different inbred lines to produce the hybrids. During the inbreeding process in maize, the vigor of the lines decreases, and so one would not be likely to use an inbred line comprising an expression cassette or recombinant construct described herein directly to produce grain. However, vigor can be restored by crossing the inbred line comprising an expression cassette or recombinant construct described herein with a different inbred line to produce a commercial F1 hybrid. An important consequence of the homozygosity and homogeneity of the inbred line is that the hybrid between a defined pair of inbreds may be reproduced indefinitely as long as the homogeneity of the inbred parents is maintained.

[0514] The inbred line comprising at least one expression cassette or recombinant construct described herein may be used to produce a single cross hybrid, a three-way hybrid or a double cross hybrid. A single cross hybrid is produced when two inbred lines are crossed to produce the F1 progeny. A double cross hybrid is produced from four inbred lines crossed in pairs (A×B and C×D) and then the two F1 hybrids are crossed again (A×B)×(C×D). A three-way cross hybrid is produced from three inbred lines where two of the inbred lines are crossed (A×B) and then the resulting F1 hybrid is crossed with the third inbred (A×B)×C.

[0515] One or more genetic traits which have been engineered into the genome of a particular maize plant or plants using transformation techniques could be moved into the genome of another line using traditional breeding techniques that are well known in the plant breeding arts. For example, a backcrossing approach is commonly used to move a transgene from a transformed maize plant to an elite inbred line, and the resulting progeny would then comprise the transgene(s). In a single gene converted plant, the plant would have essentially all the desired morphological and physiological characteristics of the inbred in addition to the single gene transferred via backcrossing or via genetic engineering. Also, if an inbred line was used for the transformation then the transgenic plants could be crossed to a different inbred in order to produce a transgenic hybrid maize plant. In the same manner, more than one transgene can be transferred into the inbred.

[0516] Hybrid plants produced by the plant breeding methods described above may be used for producing grain with increased content in one or more of protein, oil, or one or more amino acids by interplanting at least two hybrid plant populations. For example, hybrid seed comprising at least one expression cassette or recombinant construct described herein may be interplanted with another hybrid seed with high yield to obtain grain with increased content in one or more of protein, oil, or one or more amino acids at competitive yields. The invention includes methods for producing grain by planting a first hybrid seed comprising at least one expression cassette or recombinant construct described herein, and at least a second hybrid seed; growing the seeds under conditions that allow for cross pollination between the plant produced from the seed of the first hybrid and the plant produced by the seed of the second hybrid; and harvesting the grain. Conditions that allow for cross pollination between the hybrid plants include interplanting the hybrid populations in close enough proximity to allow for pollen transfer between the hybrid populations, and timing the planting of the hybrids such that pollen is released from one of the hybrids when the other hybrid is receptive to pollination. Methods of producing grain with increased value through interplanting of two or more hybrids are described, for example, in WO 2010/025213.

### 8. Stacking of Expression Cassettes

[0517] As described above, protein, oil, and/or amino acid content may be increased by introducing more than one expression cassette into an organism, wherein at least one of the expression cassettes comprises a nucleic acid molecule encoding a polypeptide having pyruvate kinase activity, and at least one of the expression cassettes comprises a nucleic acid molecule encoding a TPS homolog.

[0518] Multiple expression cassettes may be introduced into an organism in several different ways. In one embodiment, a recombinant construct is assembled which contains an expression cassette comprising a nucleic acid molecule encoding a polypeptide having pyruvate kinase activity, and an expression cassette comprising a nucleic acid molecule encoding a TPS homolog. Additional expression cassettes may also be added to this recombinant construct. The recombinant construct is cloned into a vector and an organism is transformed with the vector to produce a transgenic organism comprising the expression cassettes.

[0519] In another embodiment, at least two recombinant constructs are assembled, one containing an expression cassette comprising a nucleic acid molecule encoding a polypeptide having pyruvate kinase activity, and the other containing an expression cassette comprising a nucleic acid molecule encoding a TPS homolog. Additional recombinant constructs comprising other expression cassettes may also be assembled. Each recombinant construct is cloned into a separate vector and the organism is transformed with each of the vectors. The organism may be transformed simultaneously with each of the vectors (i.e. by co-transformation) or sequentially (i.e. by re-transformation).

[0520] In a further embodiment, multiple expression cassettes are introduced into an organism by crossing or mating of the organisms. For example, a transgenic organism containing an expression cassette comprising a nucleic acid molecule encoding a polypeptide having pyruvate kinase activity is crossed or mated with another organism containing an expression cassette comprising a nucleic acid molecule encoding a TPS homolog. The progeny may be screened to select an organism comprising both expression cassettes. Additional expression cassettes may be introduced by crossing or mating the offspring with additional transgenic organisms containing other expression cassettes.

### Description of Sequences.

| | | Amino |
|---|---|---|
| | Nucleotide | Acid |
| | SEQ | SEQ |
| Sequence Description | ID NO | ID NO |
| PKpAt920 (with native peptide) | 1 | 2 |
| PKpAt920 (w/o native peptide) | 3 | 4 |
| PKpAt920 (synthetic) | 5 | 6 |
| PKpAt920.Zm, codon optimized for Z. mays | 7 | 8 |
| PKpAt440 (with native peptide) | 9 | 10 |
| PKpAt440 (w/o native peptide) | 11 | 12 |
| PKpAt440.Zm, codon optimized for Z. mays | 13 | 14 |
| PK homolog from L. usitatissimum | 15 | 16 |
| PK homolog from L. usitatissimum codon | 17 | 18 |
| optimized for Z. mays | | |
| PK homolog from A. thaliana | 19 | 20 |
| PK homolog from A. thaliana | 21 | 22 |
| PK homolog from A. thaliana | 23 | 24 |
| PK homolog, Synthetic | 25 | 26 |
| PK homolog from B. napus | 27 | 28 |
| PK homolog from B. napus | 29 | 30 |
| PK homolog from R. communis | 31 | 32 |
| PK homolog from V. vinifera | 33 | 34 |
| PK homolog from V. vinifera | 35 | 36 |
| PK homolog from P. trichocarpa | 37 | 38 |
| PK homolog from V. vinifera | 39 | 40 |
| PK homolog from G. max | 41 | 42 |
| PK homolog from G. max | 43 | 44 |
| PK homolog from G. max | 45 | 46 |
| PK homolog from G. max | 47 | 48 |
| PK homolog from G. max | 49 | 50 |
| PK homolog from G. max | 51 | 52 |
| PK homolog from G. max | 53 | 54 |
| PK homolog from A. thaliana | 55 | 56 |
| PK homolog from A. lyrata subsp. lyrata | 57 | 58 |
| PK homolog from B. napus | 59 | 60 |
| PK homolog from Z. mays | 61 | 62 |
| PK homolog from H. annuus | 63 | 64 |
| PK homolog from H. annuus codon optimized for | 65 | 66 |
| Z. mays | | |
| PK homolog from H. annuus | 67 | 68 |
| PK homolog from H. annuus codon optimized for | 69 | 70 |
| Z. mays | | |
| PK homolog from H. annuus | 71 | 72 |
| PK homolog from H. annuus codon optimized for | 73 | 74 |
| Z. mays | | |
| PK homolog from P. wasabiae | 75 | 76 |
| PK homolog from Z. mobilis | 77 | 78 |
| PK homolog from P. profundum | 79 | 80 |
| PK homolog from A. thaliana | 81 | 82 |
| PKpAt960 | 83 | 84 |
| B1676, PK homolog from E. coli | 85 | 86 |
| B1854, PK homolog from E. coli | 87 | 88 |
| B1854.Zm, codon optimized for Z. mays | 89 | 90 |
| B1854, PK homolog from E. coli | 91 | 92 |
| PK homolog from E. coli | 93 | 94 |
| PK homolog from P. luminescens subsp. | 95 | 96 |
| laumondii TTO1 | | |
| PK homolog from P. asymbiotica subsp. | 97 | 98 |
| asymbiotica ATCC 43949 | | |
| PK homolog from A. succinogenes 130Z | 99 | 100 |
| PK active site | — | 101 |
| Pfam:PF00224 consensus sequence | — | 102 |
| Pfam:PF02887 consensus sequence | — | 103 |
| KG86_12a promoter(whole-seed specific) | 104 | — |
| Sh2 promoter from Z. mays (endosperm specific) | 105 | — |
| 10kDaZein promoter (endosperm specific) | 106 | — |
| 27kDaZein promoter (endosperm specific) | 107 | — |
| ZmGlb1 promoter (embryo-specific) | 108 | — |
| ScBV promoter (constitutive, longer version) | 109 | — |
| ScBV254 promoter (constitutive, shorter version) | 110 | — |
| Met1-1 intron (O. sativa) | 111 | — |
| MADS3 intron (O. sativa) | 112 | — |
| SpFdx transit peptide from S. pratensis | 113 | 114 |
| NOS terminator | 115 | — |
| OCS3 terminator | 116 | — |
| Consensus sequence in FIG. 1 | — | 117 |
| Consensus sequence in FIG. 2 | — | 118 |
| Consensus sequence in FIG. 3 | — | 119 |
| AtTPS8 | 120 | 121 |
| AtTPS8.Zm, codon optimized for Z. mays | 122 | 121 |
| AtTPS9 | 123 | 124 |
| AtTPS9.Zm, codon optimized for Z. mays | 125 | 124 |
| Sequence motif from Pfam PF00982.15 | — | 126 |
| Sequence motif from Pfam PF00982.15 | — | 127 |
| Sequence motif from Pfam PF00982.15 | — | 128 |
| Sequence motif from Pfam PF00982.15 | — | 129 |
| Sequence motif from Pfam PF00982.15 | — | 130 |
| Sequence motif from Pfam PF02358.10 | — | 131 |
| Sequence motif from Pfam PF02358.10 | — | 132 |
| Sequence motif from Pfam PF02358.10 | — | 133 |
| Sequence motif from Pfam PF02358.10 | — | 134 |
| Sequence motif from Pfam PF02358.10 | — | 135 |
| Sequence motif from Pfam PF02358.10 | — | 136 |
| Sequence motif from Pfam PF02358.10 | — | 137 |
| ClmMD mitochondrial transit peptide from | 138 | 139 |
| C. lanatus | | |
| KG86 promoter (whole-seed specific) | 140 | — |
| MAWS60 promoter (embryo-specific) | 141 | — |
| MAWS60v2 promoter (embryo-specific) | 142 | — |
| MAWS42 promoter (whole seed-specific) | 143 | — |
| MAWS45 promoter (whole seed-specific) | 144 | — |
| AtTPS5, TPS homolog from A. thaliana | 145 | 146 |
| AtTPS11, TPS homolog from A. thaliana | 147 | 148 |
| GmTPS-like, TPS homolog from G. max | 149 | 150 |
| OsTPS700, TPS homolog from O. sativa | 151 | 152 |
| OsTPS300, TPS homolog from O. sativa | 153 | 154 |
| OsTPS360, TPS homolog from O. sativa | 155 | 156 |
| StTPS-like, TPS homolog from S. tuberosum | 157 | 158 |
| CwTPS-like, TPS homolog from C. watsonii | 159 | 160 |
| YliTPS-like, TPS homolog from Y. lypolitica | 161 | 162 |
| TPS homolog from A. lyrata subsp. lyrata | 163 | 164 |
| TPS homolog from A. lyrata subsp. lyrata | 165 | 166 |
| TPS homolog from A. thaliana | 167 | 168 |
| TPS homolog from S. bicolor | 169 | 170 |
| TPS homolog from S. lycopersicum | 171 | 172 |
| TPS homolog from T. aestivum | 173 | 174 |
| TPS homolog from Z. marina | 175 | 176 |
| TPS homolog from Z. mays | 177 | 178 |
| TPS homolog from Z. mays | 179 | 180 |
| TPS homolog from Z. mays | 181 | 182 |
| Consensus sequence for FIG. 10 | — | 183 |
| Modified transit peptide SpFdx | 184 | 114 |
| Atc17 intron | 185 | — |
| Atss1 intron | 186 | — |
| TOI3357 terminator | 187 | — |
| Ubiquitin promoter from Z. mays (constitutive) | 188 | — |
| MAWS21 promoter from Z. mays | 189 | — |
| (endosperm-specific) | | |
| AtTPS11.Zm codon optimized for Z. mays | 190 | 148 |
| Ubiquitin intron from Z. mays | 191 | — |

[0522] The following examples serve to illustrate certain embodiments and aspects of the present invention and are not to be construed as limiting the scope thereof.

### EXAMPLES

### Example 1

### Construction of Pyruvate Kinase Expression Cassettes

[0523] General cloning processes such as, for example, restriction digests, agarose gel electrophoresis, purification of DNA fragments, PCR amplification, transformation of E. coli cells, growth of bacteria and sequence analysis of recombinant DNA were carried out as described in Sambrook and Russell. (2001, Molecular Cloning: A Laboratory Manual, Third Edition, Cold Spring Harbor Laboratory Press: ISBN 0-87969-577-3), Kaiser et al. (1994, “Methods in Yeast Genetics,” Cold Spring Harbor Laboratory Press: ISBN 0-87969-451-3), or “Gateway® Technology,” Version E, (Invitrogen, (Carlsbad, Calif.), 2010 see webpage at tools.invitrogen.com/content/sfs/manuals/gatewayman.pdf). Specific cloning methods include ligation of DNA fragments, ligation independent cloning (LIC), and/or Gateway cloning as described in Sambrook and Russell. (2001, Molecular Cloning: A Laboratory Manual, Third Edition, Cold Spring Harbor Laboratory Press: ISBN 0-87969-577-3), or “Gateway® Technology,” Version E, (Invitrogen, (Carlsbad, Calif.), 2010, see webpage at tools.invitrogen.com/content/sfs/manuals/gatewayman.pdf).

[0524] The nucleic acid molecules encoding the pyruvate kinases from Arabidopsis (At1g32440, At2g36580, or At5g52920), Brassica napus, and E. coli (b1676 or b1854) were generated through reverse translation of the protein sequence, codon optimization of the resulting nucleotide sequence for expression in maize, and DNA synthesis. Specifically, the nucleic acid molecules encoding the pyruvate kinases used in constructs 1-10 of Table 10 below were PCR amplified and cloned. The nucleic acid molecules encoding the pyruvate kinases may also be synthesized and cloned into a construct.

[0525] DNA synthesis is performed by a range of commercial vendors including Epoch Life Science (Missouri City, Tex.), Invitrogen, (Carlsbad, Calif.), Blue Heron Biotechnology (Bothell, Wash.) and DNA 2.0 (Menlo Park, Calif.). After synthesis, the nucleic acid sequence encoding the Arabidopsis pyruvate kinase (At1g32440, At2g36580, or At5g52920), Brassica napus pyruvate kinase, and E. coli pyruvate kinase (b1676 or b1854) were cloned into standard cloning vectors and sequenced.

[0526] The expression cassettes were then assembled in a vector by cloning the synthesized or cloned DNA encoding the pyruvate kinase from Arabidopsis, Brassica napus, or E. coli downstream of a promoter and upstream of a terminator. An intron from the rice Met1 gene was also cloned in between of the promoter and the pyruvate kinase coding sequence. Instead of an intron from the rice Met1 gene, an intron from the rice MADS3 gene can also be used. In some constructs where targeting the pyruvate kinase into a plastid was desired, a nucleotide sequence encoding the SpFdx transit peptide was also cloned between the intron sequence and the pyruvate kinase coding sequence. Based on various combinations of different components, examples of the expression cassettes of the invention may include, but not limited to, the expression cassettes exemplified in Tables 13 and 14 below. As further examples of expression constructs, the expression cassettes as illustrated in Table 13 optionally do not have a terminator.

TABLE 13
Examples of the expression cassettes of the invention.

| | | | Targeting | |
|---|---|---|---|---|
| Promoter | Intron | PK Gene | Peptide | Terminator |
| SEQ ID NO | SEQ ID NO | SEQ ID NO | SEQ ID NO | SEQ ID NO |
| 104 | 111 | 1 | 113 or 138 | 115 or 116 |
| 104 | 111 | 3 | 113 or 138 | 115 or 116 |
| 104 | 111 | 5 | 113 or 138 | 115 or 116 |
| 104 | 111 | 7 | 113 or 138 | 115 or 116 |
| 104 | 111 | 9 | 113 or 138 | 115 or 116 |
| 104 | 111 | 11 | 113 or 138 | 115 or 116 |
| 104 | 111 | 13 | 113 or 138 | 115 or 116 |
| 106 | 111 | 1 | 113 or 138 | 115 or 116 |
| 106 | 111 | 3 | 113 or 138 | 115 or 116 |
| 106 | 111 | 5 | 113 or 138 | 115 or 116 |
| 106 | 111 | 7 | 113 or 138 | 115 or 116 |
| 106 | 111 | 9 | 113 or 138 | 115 or 116 |
| 106 | 111 | 11 | 113 or 138 | 115 or 116 |
| 106 | 111 | 13 | 113 or 138 | 115 or 116 |
| 107 | 111 | 1 | 113 or 138 | 115 or 116 |
| 107 | 111 | 3 | 113 or 138 | 115 or 116 |
| 107 | 111 | 5 | 113 or 138 | 115 or 116 |
| 107 | 111 | 7 | 113 or 138 | 115 or 116 |
| 107 | 111 | 9 | 113 or 138 | 115 or 116 |
| 107 | 111 | 11 | 113 or 138 | 115 or 116 |
| 107 | 111 | 13 | 113 or 138 | 115 or 116 |
| 108 | 111 | 1 | 113 or 138 | 115 or 116 |
| 108 | 111 | 3 | 113 or 138 | 115 or 116 |
| 108 | 111 | 5 | 113 or 138 | 115 or 116 |
| 108 | 111 | 7 | 113 or 138 | 115 or 116 |
| 108 | 111 | 9 | 113 or 138 | 115 or 116 |
| 108 | 111 | 11 | 113 or 138 | 115 or 116 |
| 108 | 111 | 13 | 113 or 138 | 115 or 116 |
| 104 | 112 | 1 | 113 or 138 | 115 or 116 |
| 104 | 112 | 3 | 113 or 138 | 115 or 116 |
| 104 | 112 | 5 | 113 or 138 | 115 or 116 |
| 104 | 112 | 7 | 113 or 138 | 115 or 116 |
| 104 | 112 | 9 | 113 or 138 | 115 or 116 |
| 104 | 112 | 11 | 113 or 138 | 115 or 116 |
| 104 | 112 | 13 | 113 or 138 | 115 or 116 |
| 106 | 112 | 1 | 113 or 138 | 115 or 116 |
| 106 | 112 | 3 | 113 or 138 | 115 or 116 |
| 106 | 112 | 5 | 113 or 138 | 115 or 116 |
| 106 | 112 | 7 | 113 or 138 | 115 or 116 |
| 106 | 112 | 9 | 113 or 138 | 115 or 116 |
| 106 | 112 | 11 | 113 or 138 | 115 or 116 |
| 106 | 112 | 13 | 113 or 138 | 115 or 116 |
| 107 | 112 | 1 | 113 or 138 | 115 or 116 |
| 107 | 112 | 3 | 113 or 138 | 115 or 116 |
| 107 | 112 | 5 | 113 or 138 | 115 or 116 |
| 107 | 112 | 7 | 113 or 138 | 115 or 116 |
| 107 | 112 | 9 | 113 or 138 | 115 or 116 |
| 107 | 112 | 11 | 113 or 138 | 115 or 116 |
| 107 | 112 | 13 | 113 or 138 | 115 or 116 |
| 108 | 112 | 1 | 113 or 138 | 115 or 116 |
| 108 | 112 | 3 | 113 or 138 | 115 or 116 |
| 108 | 112 | 5 | 113 or 138 | 115 or 116 |
| 108 | 112 | 7 | 113 or 138 | 115 or 116 |
| 108 | 112 | 9 | 113 or 138 | 115 or 116 |
| 108 | 112 | 11 | 113 or 138 | 115 or 116 |
| 108 | 112 | 13 | 113 or 138 | 115 or 116 |
| 108 | 112 | 59 | — | 115 or 116 |
| 108 | 112 | 81 | — | 115 or 116 |
| 108 | 111 | 85 | 113 or 138 | 115 or 116 |
| 108 | 111 | 87 | 113 or 138 | 115 or 116 |
| 108 | 111 | 89 | 113 or 138 | 115 or 116 |
| 109 | 111 | 85 | — | 115 or 116 |
| 109 | 111 | 87 | — | 115 or 116 |
| 109 | 111 | 89 | — | 115 or 116 |
| 109 | 112 | 85 | — | 115 or 116 |
| 109 | 112 | 87 | — | 115 or 116 |
| 109 | 112 | 89 | — | 115 or 116 |

[0527] Table 14 below exemplifies expression cassettes that are used for overexpressing the Arabidopsis, Brassica, and E. coli pyruvate kinases in maize. Maize plants containing Construct 1, 2, 3, 4, 5, 6, 7, 8, 9, 10, 39, or 40 were evaluated in field trials for yield and protein, oil, and amino acid content (see Examples 4 and 5).

TABLE 14
Examples of expression cassettes used for overexpressing the Arabidopsis,
Brassica, and E. coli pyruvates kinase in maize.

| Construct | Cassette component | SEQ ID NO |
|---|---|---|
| 1 | p10kDaZein::i-Met1-1::SpFdx::PKpAt920::t-NOS | 106, 111, 113, 1, 115 |
| 2 | pZmGlb1::i-Met1-1::SpFdx::PKpAt920::t-NOS | 108, 111, 113, 1, 115 |
| 3 | p10kDaZein::i-Met1-1::SpFdx::PKpAt440::t-NOS | 106, 111, 113, 9, 115 |
| 4 | pZmGlb1::i-Met1-1::SpFdx::PKpAt440::t-NOS | 108, 111, 113, 9, 115 |
| 5 | pScBV::i-Met1-1::b1854::t-NOS | 109, 111, 87, 115 |
| 6 | pSh2::i-Met1-1::SpFdx::b1854::t-NOS | 105, 111, 113, 87, 115 |
| 7 | pZmGlb1::i-Met1-1::SpFdx::b1854::t-NOS | 108, 111, 113, 87, 115 |
| 8 | pZmGlb1::i-Met1-1::At2g36580::t-NOS | 108, 111, 81, 115 |
| 9 | pZmGlb1::i-Met1-1::PKpBn::t-NOS | 108, 111, 59, 115 |
| 10 | pZmGlb1::i-Met1-1::SpFdx::b1676::t-NOS | 108, 111, 113, 85, 115 |
| 35 | p10kDaZein::i-MADS3::SpFdx::PKpAt920::t-NOS | 106, 112, 184, 1, 115 |
| 36 | p10kDaZein::i-Met1-1::SpFdx::PKpAt920::t-NOS | 106, 111, 184, 1, 115 |
| 39 | pScBV::i-Met1-1::SpFdx::b1854::t-NOS | 109, 111, 113, 87, 115 |
| 40 | pUBI::i-Ubi:: PKpAt920::t-NOS | 188, 191, 1, 115 |
| 41 | pScBV254::i-Met1-1::SpFdx::PKpAt920.Zm::t-NOS | 110, 111, 113, 7, 115 |
| 42 | pScBV254::i-Met1-1:: PKpAt920::t-NOS | 110, 111, 3, 115 |
| 43 | p10kDaZein::i-Met1-1::SpFdx:: PKpAt920::t-NOS | 106, 111, 113, 3, 115 |
| 44 | p10kDaZein::i-Met1-1:: PKpAt920::t-NOS | 106, 111, 3, 115 |
| 45 | p10kDaZein::i-Met1-1::SpFdx::b1854.Zm::t-NOS | 106, 111, 113, 89, 115 |
| 46 | p10kDaZein::i-Atc17:: b1854.Zm::t-TOI3357 | 106, 185, 89, 123 |
| 47 | pUBI::i-Ubi:: PkpAt440::t-OCS3 | 188, 191, 9, 116 |
| 48 | pUBI:i-Ubi::PKpAt920.Zm::t-NOS | 188, 191, 7, 115 |
| 49 | p10kDaZein::i-Met1-1::PKpAt920.Zm::t-NOS | 106, 111, 7, 115 |
| 50 | pUBI::i-Ubi:: PkpAt440.Zm::t-OCS3 | 188, 191, 13, 116 |
| 51 | p10kDaZein::PKpAt920::t-OCS3 | 106, 1, 116 |

### Example 2

### Construction of TPS Homolog Expression Cassettes

[0528] General cloning processes were performed as described above in Example 1. AtTPS8 and AtTPS9 are Arabidopsis Class II trehalose-6-phosphate synthases that contain the PF00982.15 and PF02358.10 Pfam domains. AtTPS8 and AtTPS9 also contain the conserved amino acid sequence motifs of SEQ ID NO: 126, 127, 128, 129, 130, 131, 132, 133, 134, 135, 136 and 137. Examples of expression cassettes for overexpression of AtTPS8 or AtTPS9 are shown in Table 15 below. For Constructs 11-14, the nucleic acid sequences encoding AtTPS8 and AtTPS9 were amplified by PCR. For Construct 15, the nucleic acid sequence encoding AtTPS9 was generated through reverse translation of the protein sequence, codon optimization of the resulting nucleotide sequence for expression in maize, and DNA synthesis. DNA synthesis is performed by a range of commercial vendors including Epoch Life Science (Missouri City, Tex.), Invitrogen, (Carlsbad, Calif.), Blue Heron Biotechnology (Bothell, Wash.) and DNA 2.0 (Menlo Park, Calif.). After PCR amplification or DNA synthesis, the nucleic acid sequences encoding AtTPS8 or AtTPS9 are cloned into standard cloning vectors and sequenced.

[0529] The expression cassettes were assembled in a cloning vector by cloning the DNA encoding AtTPS8 or AtTPS9 downstream of the ScBV, ScBV254, or ZmGlb1 promoter, and upstream of the NOS terminator region. The expression cassettes also contain the first intron of the rice metallothionein gene (Met1-1) between the promoter and the coding region. In addition, Construct 13 contains the Fdx transit peptide between the Met1-1 intron and the AtTPS8 coding region. Constructs 58 and 59 contain the DNA encoding AtTPS5 downstream of the ScBV254 or KG86_{—}12a promoter and the first intron of the rice metallothionein gene (Met1-1), and upstream of the NOS terminator region. Maize plants containing Construct 11, 12, 13, 14, 52, 58, 59, or 60 were evaluated in field trials for yield and protein, oil, and amino acid content (see Examples 4 and 5).

TABLE 15
Examples of expression cassettes for overexpression of TPS homologs.

| Construct | Cassette component | SEQ ID NOs |
|---|---|---|
| 11 | p-ScBV::iMet1-1::AtTPS9::t-NOS | 109, 111, 123, 115 |
| 12 | p-ZmGlb1::i-Met1-1::AtTPS9::t-NOS | 108, 111, 123, 115 |
| 13 | p-ScBV::iMet1-1::SpFdx::AtTPS9::t-NOS | 109, 111, 113, 123, 115 |
| 14 | p-ZmGlb1::iMet1-1::AtTPS8::t-NOS | 108, 111, 120, 115 |
| 15 | p-ScBV254::i-Met1-1::AtTPS9.Zm::t-NOS | 110, 111, 125, 115 |
| 16 | p-ScBV254::i-Met1-1::GmTPS::t-NOS | 110, 111, 149, 115 |
| 17 | p-KG86_12a::i-Met1-1::GmTPS::t-NOS | 104, 111, 149, 115 |
| 18 | p-ScBV254::i-Met1-1::OsTPS360::t-NOS | 110, 111, 155, 115 |
| 19 | p-KG86_12a::i-Met1-1::OsTPS360::t-NOS | 104, 111, 155, 115 |
| 20 | p-ScBV254::i-Met1-1::StTPS::t-NOS | 110, 111, 157, 115 |
| 21 | p-KG86_12a::i-Met1-1::StTPS::t-NOS | 104, 111, 157, 115 |
| 22 | p-ScBV254::i-Met1-1::Y1iTPS::t-NOS | 110, 111, 161, 115 |
| 23 | p-ScBV254::i-Met1-1::CwTPS::t-NOS | 110, 111, 159, 115 |
| 24 | p-ScBV254::i-Met1-1::AtTPS11::t-NOS | 110, 111, 147, 115 |
| 37 | p-ScBV254::i-Met1::AtTPS9::t-NOS | 110, 111, 123, 115 |
| 38 | p-ScBV254::i-Met1::AtTPS9::t-OCS3 | 110, 111, 123, 116 |
| 52 | p-KG86_12a:: i-Met1-1::AtTPS9::t-NOS | 104, 111, 123, 115 |
| 53 | p-10kDaZein::AtTPS9::t-OCS3 | 106, 123, 116 |
| 54 | p-UBI::i-Ubi::AtTPS9::t-OCS3 | 188, 191, 123, 116 |
| 55 | p-10kDaZein:: i-Met1-1::AtTPS9.Zm::t-NOS | 106, 111, 125, 115 |
| 56 | p-27kDaZein::1-MADS3::AtTPS8.Zm::t-OCS3 | 107, 112, 122, 116 |
| 57 | p-ScBV254::i-Atc17::AtTPS9.Zm::t-TOI3357 | 110, 185, 125, 187 |
| 58 | p-KG86_12a:: i-Met1-1::AtTPS5::t-NOS | 104, 111, 145, 115 |
| 59 | p-ScBV254::i-Met1-1::AtTPS5::t-NOS | 110, 111, 145, 115 |
| 60 | p-KG86:: i-Met1-1::AtTPS9::t-NOS | 140, 111, 123, 116 |

[0530] Additional expression cassettes for overexpression of TPS homologs are assembled by the methods described above. Each of these expression cassettes contains a nucleic acid molecule encoding a TPS homolog and the additional cassette component(s) described in Table 16 below. “-” indicates that the expression cassette does not contain the listed component.

TABLE 16
Additional expression cassettes for overexpression of TPS homologs.

| Promoter | Intron | Targeting peptide | Terminator |
|---|---|---|---|
| SEQ ID NO: | SEQ ID NO: | SEQ ID NO: | SEQ ID NO: |
| 104 | 111 or 112 | 113, 138, or 184 | 115 or 116 |
| 104 | 111 or 112 | 113, 138, or 184 | — |
| 104 | 111 or 112 | — | 115 or 116 |
| 104 | 111 or 112 | — | — |
| 104 | — | 113, 138, or 184 | 115 or 116 |
| 104 | — | 113, 138, or 184 | — |
| 104 | — | — | 115 or 116 |
| 104 | — | — | — |
| 106 | 111 or 112 | 113, 138, or 184 | 115 or 116 |
| 106 | 111 or 112 | 113, 138, or 184 | — |
| 106 | 111 or 112 | — | 115 or 116 |
| 106 | 111 or 112 | — | — |
| 106 | — | 113, 138, or 184 | 115 or 116 |
| 106 | — | 113, 138, or 184 | — |
| 106 | — | — | 115 or 116 |
| 106 | — | — | — |
| 107 | 111 or 112 | 113, 138, or 184 | 115 or 116 |
| 107 | 111 or 112 | 113, 138, or 184 | — |
| 107 | 111 or 112 | — | 115 or 116 |
| 107 | 111 or 112 | — | — |
| 107 | — | 113, 138, or 184 | 115 or 116 |
| 107 | — | 113, 138, or 184 | — |
| 107 | — | — | 115 or 116 |
| 107 | — | — | — |
| 108 | 111 or 112 | 113, 138, or 184 | 115 or 116 |
| 108 | 111 or 112 | 113, 138, or 184 | — |
| 108 | 111 or 112 | — | 115 or 116 |
| 108 | 111 or 112 | — | — |
| 108 | — | 113, 138, or 184 | 115 or 116 |
| 108 | — | 113, 138, or 184 | — |
| 108 | — | — | 115 or 116 |
| 108 | — | — | — |
| 109 | 111 or 112 | 113, 138, or 184 | 115 or 116 |
| 109 | 111 or 112 | 113, 138, or 184 | — |
| 109 | 111 or 112 | — | 115 or 116 |
| 109 | 111 or 112 | — | — |
| 109 | — | 113, 138, or 184 | 115 or 116 |
| 109 | — | 113, 138, or 184 | — |
| 109 | — | — | 115 or 116 |
| 109 | — | — | — |
| 110 | 111 or 112 | 113, 138, or 184 | 115 or 116 |
| 110 | 111 or 112 | 113, 138, or 184 | — |
| 110 | 111 or 112 | — | 115 or 116 |
| 110 | 111 or 112 | — | — |
| 110 | — | 113, 138, or 184 | 115 or 116 |
| 110 | — | 113, 138, or 184 | — |
| 110 | — | — | 115 or 116 |
| 110 | — | — | — |
| 189 | 111 or 112 | 113, 138, or 184 | 115 or 116 |
| 189 | 111 or 112 | 113, 138, or 184 | — |
| 189 | 111 or 112 | — | 115 or 116 |
| 189 | 111 or 112 | — | — |
| 189 | — | 113, 138, or 184 | 115 or 116 |
| 189 | — | 113, 138, or 184 | — |
| 189 | — | — | 115 or 116 |
| 189 | — | — | — |

### Example 3

### Assembly of Recombinant Constructs or Combinations of Expression Cassettes Containing Pyruvate Kinase and TPS Homolog Expression Cassettes

[0531] The constructs in Table 17 were assembled by the methods described in Example 1 above. Each construct or combination of expression cassettes contains at least one expression cassette comprising a nucleic acid molecule encoding a polypeptide having pyruvate kinase activity or an expression cassette comprising a nucleic acid molecule encoding a TPS homolog, or combinations thereof.

[0532] Additional constructs containing stacked expression cassettes or combinations of cassettes are assembled by combining one of the expression cassettes from Table 13 above with one of the expression cassettes from Table 16. Additional expression cassettes may be added to these constructs or combinations. Each construct or expression cassette is cloned into a plant transformation vector by the methods described in Example 4.

TABLE 17
Examples of combinations of expression cassettes or of recombinant
constructs containing stacked expression cassettes.

| Construct | Cassette | Cassette component | SEQ ID NOs |
|---|---|---|---|
| 25 | 1 | p-ScBV254::i-Met1-1::AtTPS9::t-OCS3 | 110, 111, 123, 116 |
| | 2 | p-Zm10kDaZein::i-MADS3::SpFdx::PKpAt920::t-NOS | 106, 112, 184, 1, 115 |
| 26 | 1 | p-ScBV254::i-Met1-1::AtTPS9::t-NOS | 110, 111, 123, 115 |
| | 2 | p-Zm10kDaZein::i-Met1-1::SpFdx::PKpAt920::t-NOS | 106, 111, 113, 3, 115 |
| 27 | 1 | p-Zm10kDaZein::i-Met1-1::PKpAt920::t-NOS | 106, 111, 1, 115 |
| | 2 | p-KG86_12a:: i-Met1-1::PKpAt960::t-OCS3 | 104, 111, 83, 116 |
| 28 | 1 | p-Zm10kDaZein::i-Met1-1::PKpAt920::t-NOS | 106, 111, 1, 115 |
| | 2 | p-ZmGlb1::i-Met1-1::PKpAt440:: t-NOS | 108, 111, 9, 115 |
| 29 | 1 | p-Zm10kDaZein::i-Met1-1::PKpAt920.Zm::t-NOS | 106, 111, 7, 115 |
| | 2 | p-ZmUbi::i-Ubi::PKpAt440.Zm:: t-OCS3 | 188, 191, 13, 116 |
| 30 | 1 | p-ScBV254::i-Atc17::AtTPS9.Zm::TOI3357 | 110, 185, 129, 187 |
| | 2 | p-Zm27kDaZein::i-MADS3::AtTPS8.Zm::t-OCS3 | 107, 112, 122, 116 |
| | 3 | p-KG86_12a::i-Met1-1::AtTPS11.Zm::t-NOS | 104, 111, 190, 115 |
| 31 | 1 | p-ScBV254::i-Atc17::AtTPS9.Zm::TOI3357 | 110, 185, 125, 187 |
| | 2 | p-Zm27kDaZein::i-MADS3::AtTPS8.Zm::t-OCS3 | 107, 112, 122, 116 |
| 32 | 1 | p-Zm10kDaZein::i-Met1-1::PKpAt440.Zm::t-OCS3 | 106, 111, 113, 116 |
| | 2 | p-ScBV254::i-Atc17::AtTPS9.Zm::TOI3357 | 110, 185, 125, 187 |
| 33 | 1 | p-Zm10kDaZein::AtTPS9::t-OCS3 | 106, 123, 116 |
| | 2 | p-Zm27kDaZein::i-MADS3::AtTPS8.Zm::t-NOS | 107, 112, 122, 115 |
| | 3 | p-MAWS21::i-Met1-1::AtTPS11.Zm:: TOI3357 | 189, 111, 190, 187 |
| 34 | 1 | p10kDaZein::i-Met1-1::SpFdx::PKpAt920::t-NOS | 106, 111, 184, 3, 115 |
| | 2 | pScBV::i-Met1-1::b1854::t-NOS | 109, 111, 87, 115 |

[0533] Additional combinations of stacked expression cassettes are shown in Tables 18 and 19 below. The combinations in Table 18 may also comprise an additional expression cassette, for example, one of the expression cassettes shown in Table 13, 14, 15, or 16. The expression cassettes shown in Tables 18 and 19 may comprise any of the expression cassette components, such as promoters, introns, transit peptides, and/or terminators, described herein.

[0534] The expression cassettes may be combined in an organism by several different methods. For example, in one method, the expression cassettes are combined in a single recombinant construct and the organism is transformed with this construct. When combined in a single recombinant construct, the expression cassettes in Tables 18 and 19 can be in any order. In another method, an organism is transformed with multiple recombinant constructs, each containing one or more expression cassettes. The expression cassettes may also be combined by crossing or mating organisms that contain one or more expression cassettes.

TABLE 18
Examples of combinations of two expression cassettes.

| Cassette 1 | Cassette 2 |
|---|---|
| AtTPS8 | AtTPS9 |
| AtTPS8 | AtTPS11 |
| AtTPS8 | PKpAt440 |
| AtTPS8 | PKpAt920 |
| AtTPS8 | PKpAt960 |
| AtTPS9 | AtTPS11 |
| AtTPS9 | PKpAt440 |
| AtTPS9 | PKpAt920 |
| AtTPS9 | PKpAt960 |
| AtTPS11 | PKpAt440 |
| AtTPS11 | PKpAt920 |
| AtTPS11 | PKpAt960 |
| PKpAt440 | PKpAt920 |
| PKpAt440 | PKpAt960 |
| PKpAt920 | PKpAt960 |
| PKpAt920 | b1854 |
| PKpAt440 | b1854 |
| PKpAt960 | b1854 |
| AtTPS8 | b1854 |
| AtTPS9 | b1854 |
| AtTPS11 | b1854 |

TABLE 19
Examples of combinations of three expression cassettes.

| Cassette 1 | Cassette 2 | Cassette 3 |
|---|---|---|
| AtTPS8 | AtTPS9 | AtTPS11 |
| AtTPS8 | AtTPS9 | PKpAt440 |
| AtTPS8 | AtTPS9 | PKpAt920 |
| AtTPS8 | AtTPS9 | PKpAt960 |
| AtTPS8 | AtTPS11 | PKpAt440 |
| AtTPS8 | AtTPS11 | PKpAt920 |
| AtTPS8 | AtTPS11 | PKpAt960 |
| AtTPS8 | PKpAt440 | PKpAt920 |
| AtTPS8 | PKpAt440 | PKpAt960 |
| AtTPS8 | PKpAt920 | PKpAt960 |
| AtTPS9 | AtTPS11 | PKpAt440 |
| AtTPS9 | AtTPS11 | PKpAt920 |
| AtTPS9 | AtTPS11 | PKpAt960 |
| AtTPS9 | PKpAt440 | PKpAt920 |
| AtTPS9 | PKpAt440 | PKpAt960 |
| AtTPS9 | PKpAt920 | PKpAt960 |
| AtTPS11 | PKpAt440 | PKpAt920 |
| AtTPS11 | PKpAt440 | PKpAt960 |
| AtTPS11 | PKpAt920 | PKpAt960 |
| PKpAt440 | PKpAt920 | PKpAt960 |
| AtTPS8 | AtTPS9 | b1854 |
| AtTPS8 | AtTPS11 | b1854 |
| AtTPS9 | AtTPS11 | b1854 |
| AtTPS9 | PKpAt440 | b1854 |
| AtTPS9 | PKpAt920 | b1854 |
| AtTPS11 | PKpAt440 | b1854 |
| AtTPS11 | PKpAt920 | b1854 |
| AtTPS8 | PKpAt440 | b1854 |
| AtTPS8 | PKpAt920 | b1854 |
| AtTPS8 | PKpAt960 | b1854 |
| AtTPS9 | PKpAt960 | b1854 |
| AtTPS11 | PKpAt960 | b1854 |

### Example 4

### Construction of Plant Transformation Vectors

[0535] Plant transformation binary vectors such as pBi-nAR are used (Hagen & Willmitzer 1990, Plant Sci. 66:221-230). Construction of the binary vectors was performed by ligation of the expression cassette or recombinant construct into the binary vector. Further examples for plant binary vectors are the pSUN300 or pSUN2-GW vectors and the pPZP vectors (Hajdukiewicz et al., Plant Molecular Biology 25: 989-994, 1994). An example of a two T-DNA binary plasmid is pWBVec82b (Matthews et al., Molecular Breeding 7:195-201, 2001).

[0536] For gene cassette stacking into a plant transformation vector, gene expression cassettes are assembled utilizing standard restriction ligation cloning into Gateway Entry vectors with multi-cloning sites and Gateway recombination sites. A Gateway destination recombination site includes the att sites and selection genes as defined by Invitrogen (Invitrogen, (Carlsbad, Calif.), 2010, website at tools.invitrogen.com/content/sfs/manuals/gatewayman.pdf). Two or more such Entry vectors can be recombined with a Gateway destination parent binary vector to create the final multiple cassette plant transformation binary vector using multisite Gateway.

[0537] For construct 25, two Gateway Entry vectors were constructed, one containing the PK cassette and the second containing the TPS cassette. These were recombined using multisite Gateway technology into a two T-DNA Gateway destination parent binary vector, containing a selectable marker in the first T-DNA and the Gateway destination recombination sites within the second T-DNA region, which were constructed using standard restriction ligation cloning methods.

[0538] The recombinant vector containing the expression cassette or recombinant construct was transformed into Top10 cells (Invitrogen) using standard conditions. Transformed cells were selected on LB agar containing 50 μg/ml kanamycin grown overnight at 37° C. Plasmid DNA was extracted using the QIAprep Spin Miniprep Kit (Qiagen) following manufacturer's instructions. Analysis of subsequent clones and restriction mapping was performed according to standard molecular biology techniques (Sambrook et al., 1989, “Molecular Cloning: A Laboratory Manual,” 2nd Edition, Cold Spring Harbor Laboratory Press, Cold Spring Harbor, N.Y.).

### Example 5

### Plant Transformation

### Maize

[0539] Agrobacterium cells harboring a plasmid containing the gene of interest and the mutated maize AHAS gene were grown in YP medium supplemented with appropriate antibiotics for 1-2 days. One loop of Agrobacterium cells was collected and suspended in 1.8 ml M-LS-002 medium (LS-inf). The cultures were incubated while shaking at 1,200 rpm for 5 min-3 hrs. Corn cobs were harvested at 8-11 days after pollination. The cobs were sterilized in 20% Clorox solution for 5 min, followed by spraying with 70% Ethanol and then thoroughly rinsed with sterile water. Immature embryos 0.8-2.0 mm in size were dissected into the tube containing Agrobacterium cells in LS-inf solution.

[0540] The constructs were transformed into immature embryos by a protocol modified from Japan Tobacco Agrobacterium mediated plant transformation method (U.S. Pat. Nos. 5,591,616; 5,731,179; 6,653,529; and U.S. Patent Application Publication No. 2009/0249514). Two types of plasmid vectors were used for transformation. One type had only one T-DNA border on each of left and right side of the border, and selectable marker gene and gene of interest were between the left and right T-DNA borders. The other type was so called “two T-DNA constructs” as described in Japan Tobacco U.S. Pat. No. 5,731,179. In the two DNA constructs, the selectable marker gene was located between one set of T-DNA borders and the gene of interest was included in between the second set of T-DNA borders. Either plasmid vector can be used. The plasmid vector was electroporated into Agrobacterium.

[0541] Agrobacterium infection of the embryos was carried out by inverting the tube several times. The mixture was poured onto a filter paper disk on the surface of a plate containing co-cultivation medium (M-LS-011). The liquid agro-solution was removed and the embryos were checked under a microscope and placed scutellum side up. Embryos were cultured in the dark at 22° C. for 2-4 days, and transferred to M-MS-101 medium without selection and incubated for four to seven days. Embryos were then transferred to M-LS-202 medium containing 0.75 μM imazethapyr and grown for three weeks at 27° C. to select for transformed callus cells.

[0542] Plant regeneration was initiated by transferring resistant calli to M-LS-504 medium supplemented with 0.75 μM imazethapyr and growing under light at 26° C. for two to three weeks. Regenerated shoots were then transferred to a rooting box with M-MS-618 medium (0.5 μM imazethapyr). Plantlets with roots were transferred to soil-less potting mixture and grown in a growth chamber for a week, then transplanted to larger pots and maintained in a greenhouse until maturity.

[0543] Transgenic maize plant production is also described, for example, in U.S. Pat. Nos. 5,591,616 and 6,653,529; U.S. Patent Application Publication No. 2009/0249514; and WO/2006136596, each of which are hereby incorporated by reference in their entirety. Transformation of maize may be made using Agrobacterium transformation, as described in U.S. Pat. Nos. 5,591,616; 5,731,179; U.S. Patent Application Publication No. 2002/0104132, and the like. Transformation of maize (Zea mays L.) can also be performed with a modification of the method described by Tshida et al. (Nature Biotech., 1996, 14:745-750). The inbred line A188 (University of Minnesota) or hybrids with A188 as a parent are good sources of donor material for transformation (Fromm et al., Biotech, 1990, 8:833), but other genotypes can be used successfully as well. Ears are harvested from corn plants at approximately 11 days after pollination (DAP) when the length of immature embryos is about 1 to 1.2 mm. Immature embryos are co-cultivated with Agrobacterium tumefaciens that carry “super binary” vectors and transgenic plants are recovered through organogenesis. The super binary vector system is described in WO 94/00977 and WO 95/06722. Vectors are constructed as described. Various selection marker genes are used including the maize gene encoding a mutated acetohydroxy acid synthase (AHAS) enzyme (U.S. Pat. No. 6,025,541). Similarly, various promoters are used to regulate the trait gene to provide constitutive, developmental, inducible, tissue or environmental regulation of gene transcription.

[0544] Excised embryos can be used and can be grown on callus induction medium, then maize regeneration medium, containing imidazolinone as a selection agent. The Petri dishes are incubated in the light at 25° C. for 2-3 weeks, or until shoots develop. The green shoots are transferred from each embryo to maize rooting medium and incubated at 25° C. for 2-3 weeks, until roots develop. The rooted shoots are transplanted to soil in the greenhouse. T1 seeds are produced from plants that exhibit tolerance to the imidazolinone herbicides and which are PCR positive for the transgenes.

### Wheat

[0545] A specific example of wheat transformation can be found in WO 93/07256. Transformation of wheat can also be performed with the method described by Ishida et al. (Nature Biotech., 1996, 14: 745-750). The cultivar Bobwhite (available from CYMMIT, Mexico) is commonly used in transformation. Immature embryos are co-cultivated with Agrobacterium tumefaciens that carry “super binary” vectors, and transgenic plants are recovered through organogenesis. The super binary vector system is described in WO 94/00977 and WO 95/06722, which are hereby incorporated by reference in its entirety. Vectors are constructed as described. Various selection marker genes can be used including the maize gene encoding a mutated acetohydroxy acid synthase (AHAS) enzyme (U.S. Pat. No. 6,025,541). Similarly, various promoters can be used to regulate the trait gene to provide constitutive, inducible, developmental, tissue or environmental regulation of gene transcription.

[0546] After incubation with Agrobacterium, the embryos are grown on callus induction medium, then regeneration medium, containing imidazolinone as a selection agent. The Petri dishes are incubated in the light at 25° C. for 2-3 weeks, or until shoots develop. The green shoots are transferred from each embryo to rooting medium and incubated at 25° C. for 2-3 weeks, until roots develop. The rooted shoots are transplanted to soil in the greenhouse. T1 seeds are produced from plants that exhibit tolerance to the imidazolinone herbicides and which are PCR positive for the transgenes.

### Rice

[0547] Rice may be transformed using methods disclosed in U.S. Pat. No. 4,666,844, U.S. Pat. No. 5,350,688, U.S. Pat. No. 6,153,813, U.S. Pat. No. 6,333,449, U.S. Pat. No. 6,288,312, U.S. Pat. No. 6,365,807, U.S. Pat. No. 6,329,571, and the like.

### Soybean

[0548] Transformation of soybean can be performed using, for example, a technique described in EP 0424047, U.S. Pat. No. 5,322,783, EP 0397687, U.S. Pat. No. 5,376,543, U.S. Pat. No. 5,169,770, or by any of a number of other transformation procedures known in the art. Soybean seeds are surface sterilized with 70% ethanol for 4 minutes at room temperature with continuous shaking, followed by 20% (v/v) bleach supplemented with 0.05% (v/v) TWEEN for 20 minutes with continuous shaking. Then the seeds are rinsed 4 times with distilled water and placed on moistened sterile filter paper in a Petri dish at room temperature for 6 to 39 hours. The seed coats are peeled off, and cotyledons are detached from the embryo axis. The embryo axis is examined to make sure that the meristematic region is not damaged. The excised embryo axes are collected in a half-open sterile Petri dish and air-dried to a moisture content less than 20% (fresh weight) in a sealed Petri dish until further use.

Brassica napus

[0549] Canola may be transformed, for example, using methods such as those disclosed in U.S. Pat. No. 5,188,958, U.S. Pat. No. 5,463,174, U.S. Pat. No. 5,750,871, FP1566443, WO02/00900, and the like.

[0550] For example, seeds of canola are surface sterilized with 70% ethanol for 4 minutes at room temperature with continuous shaking, followed by 20% (v/v) CLOROX supplemented with 0.05% (v/v) TWEEN for 20 minutes, at room temperature with continuous shaking. Then, the seeds are rinsed four times with distilled water and placed on moistened sterile filter paper in a Petri dish at room temperature for 18 hours. The seed coats are removed and the seeds are air dried overnight in a half-open sterile Petri dish. During this period, the seeds lose approximately 85% of their water content. The seeds are then stored at room temperature in a sealed Petri dish until further use.

[0551] Agrobacterium tumefaciens culture is prepared from a single colony in LB solid medium plus appropriate antibiotics (e.g. 100 mg/l streptomycin, 50 mg/l kanamycin) followed by growth of the single colony in liquid LB medium to an optical density at 600 nm of 0.8. Then, the bacteria culture is pelleted at 7000 rpm for 7 minutes at room temperature, and resuspended in MS (Murashige et al., 1962, Physiol. Plant. 15: 473-497) medium supplemented with 100 mM acetosyringone. Bacteria cultures are incubated in this pre-induction medium for 2 hours at room temperature before use. The axis of canola zygotic seed embryos at approximately 44% moisture content are imbibed for 2 hours at room temperature with the pre-induced Agrobacterium suspension culture. (The imbibition of dry embryos with a culture of Agrobacterium is also applicable to maize and soybean embryo axes). The embryos are removed from the imbibition culture and are transferred to Petri dishes containing solid MS medium supplemented with 2% sucrose and incubated for 2 days, in the dark at room temperature. Alternatively, the embryos are placed on top of moistened (liquid MS medium) sterile filter paper in a Petri dish and incubated under the same conditions described above. After this period, the embryos are transferred to either solid or liquid MS medium supplemented with 500 mg/l carbenicillin or 300 mg/l cefotaxime to kill the Agrobacteria. The liquid medium is used to moisten the sterile filter paper. The embryos are incubated during 4 weeks at 25° C., under 440 μmol m²s¹ and a 12 hour photoperiod. Once the seedlings have produced roots, they are transferred to sterile soil. The medium of the in vitro plants is washed off before transferring the plants to soil. The plants are kept under a plastic cover for 1 week to favor the acclimatization process. Then the plants are transferred to a growth room where they are incubated at 25° C., under 440 μmol m²s¹ light intensity and 12-hour photoperiod for about 80 days.

[0552] Samples of the primary transgenic plants (T0) are analyzed by PCR to confirm the presence of T-DNA. These results can be confirmed by Southern hybridization wherein DNA is electrophoresed on a 1% agarose gel and transferred to a positively charged nylon membrane (Roche Diagnostics). The PCR DIG Probe Synthesis Kit (Roche Diagnostics) is used to prepare a digoxigenin labeled probe by PCR as recommended by the manufacturer.

### Example 6

### Production of Transgenic Plants Containing Stacked Expression Cassettes or Multiple Genes of Interest

[0553] Transgenic plants containing stacked expression cassettes or multiple genes of interest are produced by the methods described in Example 3. Methods for introducing multiple expression cassettes in a single recombinant construct are also described, for example, in Dafny-Yelin et al. (Plant Physiol., 2007, 145: 1118-1128) and Douglas et al. (“Gene Stacking”, in Molecular Techniques in Crop Improvement, Second Edition, Chapter 26, pp. 613-629 (2010)).

[0554] Transgenic plants containing stacked expression cassettes are also produced by transforming a plant with multiple transformation vectors, each containing a different expression cassette. This method is described, for example, in U.S. Pat. No. 6,455,315 and Douglas et al. (2010). In one embodiment, one transformation vector contains an expression cassette comprising a nucleic acid molecule encoding a polypeptide with pyruvate kinase activity, and another transformation vector contains an expression cassette comprising a nucleic acid molecule encoding a TPS homolog. Additional transformation vectors containing other expression cassettes may also be assembled. The plant is transformed with each of the transformation vectors to produce a transgenic plant containing multiple expression cassettes. The multiple expression cassettes are introduced by co-transformation, i.e. simultaneous transformation with two or more transformation vectors, or by re-transformation, i.e. transformation of a transgenic plant containing one or more expression cassettes with a transformation vector containing an additional expression cassette. Co-transformation and re-transformation are described in Douglas et al. (2010). Transgenic plants containing the stacked expression cassettes or multiple genes of interest are selected by PCR or Southern hybridization as described in Example 3.

[0555] Transgenic plants comprising multiple genes of interest including a nucleic acid molecule encoding a polypeptide having pyruvate kinase activity and a nucleic acid molecule encoding a TPS homolog can be produced by any method known in the art.

[0556] Multiple expression cassettes are also combined in a single plant through crossing of transgenic plants as described, for example, in US 2010/0132072 and Douglas et al. (2010). In this method, a transgenic plant containing an expression cassette comprising a nucleic acid molecule encoding a polypeptide having pyruvate kinase activity, and a transgenic plant containing an expression cassette comprising a nucleic acid molecule encoding a TPS homolog, are produced by the methods described above. The plants are then crossed to produce plants containing the expression cassettes from the parents. Additional expression cassettes may be introduced through additional crosses to transgenic plants containing other expression cassettes.

### Example 7

### Yield and Grain Composition of F1 Hybrid Maize Plants

[0557] Transgenic events were produced by transformation of a maize inbred line with Constructs 1, 2, 3, 4, 5, 6, 7, 8, 9, 10, 11, 12, 13, 14, 15, 26, 29, or 39. Homozygous events were planted in an isolated crossing block, detasseled, and open pollinated with a male tester to produce hybrid seed (F1 generation). The hybrid seed was used in field trials for grain yield and composition and were planted in three to twelve locations with two to four replications per location. Separate field trials were conducted for yield and analysis of grain composition. Field trials for yield were allowed to open pollinate. Field trials for composition were hand pollinated. However, either pollination method may be used for yield or composition trials. Trials were planted in a randomized complete block design, with all events per construct and corresponding isogenic non-transgenic hybrid controls. Data were collected from the composition trials for grain protein, oil and six or seven amino acids (arginine, cysteine, isoleucine, lysine, methionine, threonine, and valine) on a percent dry weight basis. Data were generated for one to four hybrid combinations over one or two years. Data was subjected to ANOVA by using JMP, where locations were treated as blocks and means were separated at the 0.05 level of significance.

[0558] Transgenic events were also produced by transformation of a maize inbred line with constructs 52, 58, 59, or 60. Field trials for constructs 52, 58, 59, and 60 were based on an initial field screen with minimal replications and locations.

### Example 8

### Analysis of Protein, Oil, and Amino Acid Content

[0559] Protein content and content of one or more amino acids of transgenic and corresponding wild-type plants, plant parts, or seeds can be evaluated by methods known in the art, for example, as described for corn in US 2005/0241020, which is hereby incorporated by reference in its entirety.

[0560] Protein and oil content were determined on a dry matter basis. Protein and oil content was measured by near-infrared (NIR) spectroscopy using a Perten DA7200 NIR analyzer and Partial Least Squares (PLS) calibration models developed based on nitrogen combustion and supercritical fluid extraction reference methods for measurement of total protein and total oil, respectively (Williams, P., Norris, K., Eds. Near-Infrared Technology in the Agricultural and Food Industries, 2nd ed.; American Association of Cereal Chemists, Inc., St. Paul, Minn., 2001; AACC, Approved Methods, 10th ed., AACC Method 39-00, Near-Infrared Methods—Guidelines for Model Development and Maintenance; American Association of Cereal Chemists, Inc.; St. Paul, Minn., 2000). Samples may also be analyzed for crude protein (2000, Combustion Analysis (LECO) AOAC Official Method 990.03), crude fat (2000, Ether Extraction, AOAC Official Method 920.39 (A)), and moisture (2000, vacuum oven, AOAC Official Method 934.01).

[0561] An example of amino acid analysis of transgenic seed can be found for corn in US 2005/0241020. For example, mature seed samples were ground with an IKA A11 basic analytical mill. Samples were analyzed for amino acids using a modified Association of Official Analytical Chemists (AOAC) official method 982.30 E (a, b, c), CHP 45.3.05, 2000, with four repetitions, modified by using the Waters AccuTag system on the Acquity UPLC platform (reference paper accepted for publication). Samples may also analyzed for complete amino acid profile (AAP) using the Association of Official Analytical Chemists (AOAC) official method 982.30 E (a, b, c), CHP 45.3.05, 2000.

[0562] Protein, oil, and amino acid content of transgenic and corresponding wild-type plants, plant parts, or seeds comprising multiple genes of interest, multiple expression cassettes, or recombinant constructs are analyzed in a similar way.

[0563] Protein, oil, and amino acid content will vary widely from one location to another due to environmental effects such as weather conditions, nutrient availability, and soil moisture, as well as variation in agronomic conditions such as planting density. Thus, it is important to consider the relative difference between the transgenic hybrid and the isogenic hybrid control at each location to determine transgene effects.

[0564] As shown in Tables 20-23 (Construct 1) and 26-30 (Construct 3), overexpression of two Arabidopsis pyruvate kinases, At5g52920 and At1g32440, in maize endosperm that are targeted to the plastid significantly increased the content of oil and one or more of the following amino acids arginine, valine, methionine, lysine, cysteine and threonine. In some events, the overexpression also increased the content of protein as shown in Tables 20-23 (Construct 1). Embryo-specific expression of the Arabidopsis pyruvate kinase, At5g52920, via the ZmGlb1 promoter also resulted in significant increase in oil content (Tables 24-25; Construct 2). Plastid-targeted overexpression of the E. coli pyruvate kinase TT (b1854) in maize endosperm via the pSh2 promoter (a medium strength promoter compared to the stronger 10 kDa zein promoter) did not result in a significant effect in kernel composition (Tables 39-40; Construct 6). When constitutively overexpressing the E. coli pyruvate kinase II (b1854) via the ScBV promoter without plastid targeting (Tables 34-38; Construct 5) and with plastid targeting (Tables 49-50; Construct 39), a high increase in the content of protein, oil, and one or more of the amino acids arginine, valine, methionine, lysine, cysteine, isoleucine, and threonine was observed.

[0565] Overexpression of AtTPS8 or AtTPS9 also significantly increased protein, oil, and/or amino acid content in maize kernels. Constitutive expression of AtTPS9 via the ScBV promoter with no additional targeting significantly increased protein, oil and the amino acids arginine, cysteine, lysine, methionine, threonine and valine in two events with no significant decrease in yield (Construct 11, Tables 51-54). Constitutive expression of AtTPS9 combined with additional targeting to the plastid resulted in increased protein and oil content in two events with no significant decrease in yield (Construct 13, Tables 57-58). Embryo-specific expression of AtTPS9 via the ZmGlb1 promoter resulted mainly in significant increases in oil in several events with no significant decrease in yield (Construct 12, Tables 55-56). Constitutive expression of AtTPS8 via the ScBV promoter with no additional targeting significantly increased oil content (Construct 14, Tables 59-60). In initial field screens with minimal replications and locations, whole seed expression of AtTPS9 via the KG86_{—}12a promoter significantly increased protein and isoleucinc content (Construct 52, data not shown). In initial field screens with minimal replications and locations, whole seed expression of AtTPS9 via the KG86 promoter showed similar trends as with the KG86_{—}12a promoter (Construct 60, data not shown). Constitutive expression via the ScBV254 promoter or whole seed expression via the KG86_{—}12a promoter of AtTPS5 did not show statistically significant increases in protein, oil, or the amino acids arginine, cysteine, lysine, methionine, threonine, and valine in the initial field screens which had minimal replications and locations (Constructs 58-59; data not shown).

[0566] Overexpression of a stack of Arabidopsis pyruvate kinase At5g52920 (PKpAt920) in the endosperm and targeted to the plastid and of AtTPS9 expressed constitutively in maize significantly increased the content of oil, protein and the feed target amino acids arginine, valine, methionine, lysine, isoleucinc, cysteine and threonine (Construct 29; Table 62).

[0567] Overexpression of a stack of 2 isoforms of Arabidopsis pyruvate kinases At5g52920 (PKpAt920.Zm) in the endosperm and of At1g32440 (PKpAt440.Zm) expressed constitutively in maize significantly increases the content of the feed target amino acids arginine, valine, lysine and threonine, with some events showing significant increases in protein, cysteine, isoleucine and methionine (Construct 26; Table 61).

TABLE 20
Summary of field data for Construct 1. Numbers shown in bold are significantly different from the control at the
p-value shown. bu/a is bushels per acre. “All” indicates the average across all events. (T/C) % is the value for
the transgenic hybrid combination (T) expressed as a percent of the control (C).

| | | Yield | Oil | Protein | Arg | Cys | Lys | Met | Thr | Val |
|---|---|---|---|---|---|---|---|---|---|---|
| | | (bu/a) | (%) | (%) | (%) | (%) | (%) | (%) | (%) | (%) |
| Event | Description | p < 0.1 | p < 0.05 | p < 0.05 | p < 0.05 | p < 0.05 | p < 0.05 | p < 0.05 | p < 0.05 | p < 0.05 |
| All | (T/C) % | 98 | 100 | 103 | 114 | 110 | 110 | 110 | 107 | 110 |
| 1A | (T/C) % | 96 | 99 | 104 | 110 | 107 | 106 | 109 | 106 | 109 |
| 1B | (T/C) % | 97 | 101 | 104 | 117 | 113 | 111 | 110 | 108 | 114 |
| 1C | (T/C) % | 96 | 98 | 108 | 113 | 114 | 108 | 112 | 107 | 112 |
| 1D | (T/C) % | 96 | 101 | 103 | 117 | 113 | 114 | 108 | 107 | 111 |
| 1E | (T/C) % | 102 | 99 | 100 | 114 | 107 | 113 | 110 | 107 | 111 |
| 1F | (T/C) % | 98 | 99 | 100 | 113 | 107 | 111 | 108 | 106 | 109 |
| 1G | (T/C) % | 100 | 102 | 102 | 113 | 110 | 109 | 112 | 106 | 110 |

TABLE 21
Field data for Construct 1. Numbers shown in bold are significantly different from the control at the p-value shown.
bu/a is bushels per acre. “All” indicates the average across all events or all testers. (T/C) % is the value for the
transgenic hybrid combination (T) expressed as a percent of the control (C). T − C is the transgenic hybrid combination
minus the control. Oil, protein, and amino acid content are shown as percent of seed dry weight.

| | | Yield | Oil | Protein | Arg | Cys | Lys | Met | Thr | Val |
|---|---|---|---|---|---|---|---|---|---|---|
| | | (bu/a) | (%) | (%) | (%) | (%) | (%) | (%) | (%) | (%) |
| Event | Description | p < 0.1 | p < 0.05 | p < 0.05 | p < 0.05 | p < 0.05 | p < 0.05 | p < 0.05 | p < 0.05 | p < 0.05 |
| All | Construct (T) | 159.5 | 5.3 | 9.9 | 0.373 | 0.184 | 0.386 | 0.186 | 0.336 | 0.514 |
| All | Control (C) | 162.8 | 5.3 | 9.6 | 0.329 | 0.167 | 0.349 | 0.169 | 0.315 | 0.465 |
| All | T − C | −3.2 | 0.0 | 0.3 | 0.044 | 0.017 | 0.036 | 0.017 | 0.021 | 0.048 |
| All | (T/C) % | 98 | 100 | 103 | 114 | 110 | 110 | 110 | 107 | 110 |
| All | p-value | 0.16 | 0.85 | 0.03 | 0.00 | 0.00 | 0.00 | 0.00 | 0.00 | 0.00 |
| 1A | Event (T) | 156.9 | 5.2 | 10.0 | 0.361 | 0.179 | 0.372 | 0.184 | 0.334 | 0.507 |
| 1A | Control (C) | 162.7 | 5.3 | 9.6 | 0.329 | 0.167 | 0.350 | 0.169 | 0.315 | 0.465 |
| 1A | T − C | −5.7 | −0.1 | 0.4 | 0.032 | 0.011 | 0.023 | 0.015 | 0.020 | 0.041 |
| 1A | (T/C) % | 96 | 99 | 104 | 110 | 107 | 106 | 109 | 106 | 109 |
| 1A | p-value | 0.15 | 0.45 | 0.05 | 0.00 | 0.08 | 0.01 | 0.00 | 0.00 | 0.00 |
| 1B | Event (T) | 158.2 | 5.3 | 9.9 | 0.383 | 0.188 | 0.389 | 0.187 | 0.341 | 0.529 |
| 1B | Control (C) | 162.7 | 5.3 | 9.6 | 0.329 | 0.167 | 0.350 | 0.169 | 0.314 | 0.465 |
| 1B | T − C | −4.5 | 0.0 | 0.4 | 0.054 | 0.021 | 0.039 | 0.018 | 0.026 | 0.064 |
| 1B | (T/C) % | 97 | 101 | 104 | 117 | 113 | 111 | 110 | 108 | 114 |
| 1B | p-value | 0.28 | 0.70 | 0.06 | 0.00 | 0.00 | 0.00 | 0.00 | 0.00 | 0.00 |
| 1C | Event (T) | 156.5 | 5.2 | 10.4 | 0.371 | 0.190 | 0.379 | 0.189 | 0.338 | 0.520 |
| 1C | Control (C) | 162.7 | 5.3 | 9.6 | 0.329 | 0.167 | 0.350 | 0.169 | 0.315 | 0.466 |
| 1C | T − C | −6.2 | −0.1 | 0.8 | 0.042 | 0.023 | 0.029 | 0.020 | 0.023 | 0.054 |
| 1C | (T/C) % | 96 | 98 | 108 | 113 | 114 | 108 | 112 | 107 | 112 |
| 1C | p-value | 0.18 | 0.21 | 0.00 | 0.00 | 0.00 | 0.00 | 0.00 | 0.00 | 0.00 |
| 1D | Event (T) | 156.8 | 5.4 | 9.9 | 0.384 | 0.189 | 0.397 | 0.182 | 0.335 | 0.516 |
| 1D | Control (C) | 162.7 | 5.3 | 9.6 | 0.329 | 0.167 | 0.349 | 0.169 | 0.315 | 0.455 |
| 1D | T − C | −5.9 | 0.0 | 0.3 | 0.055 | 0.022 | 0.048 | 0.013 | 0.021 | 0.051 |
| 1D | (T/C) % | 96 | 101 | 103 | 117 | 113 | 114 | 108 | 107 | 111 |
| 1D | p-value | 0.16 | 0.70 | 0.09 | 0.00 | 0.00 | 0.00 | 0.01 | 0.00 | 0.00 |
| 1E | Event (T) | 166.6 | 5.3 | 9.6 | 0.375 | 0.179 | 0.396 | 0.185 | 0.336 | 0.515 |
| 1E | Control (C) | 162.7 | 5.3 | 9.6 | 0.329 | 0.167 | 0.350 | 0.169 | 0.315 | 0.465 |
| 1E | T − C | 3.9 | 0.0 | 0.0 | 0.046 | 0.012 | 0.046 | 0.016 | 0.021 | 0.049 |
| 1E | (T/C) % | 102 | 99 | 100 | 114 | 107 | 113 | 110 | 107 | 111 |
| 1E | p-value | 0.32 | 0.68 | 0.96 | 0.00 | 0.05 | 0.00 | 0.00 | 0.00 | 0.00 |
| 1F | Event (T) | 159.9 | 5.2 | 9.6 | 0.370 | 0.179 | 0.389 | 0.183 | 0.333 | 0.506 |
| 1F | Control (C) | 162.7 | 5.3 | 9.6 | 0.329 | 0.167 | 0.350 | 0.169 | 0.315 | 0.465 |
| 1F | T − C | −2.8 | −0.1 | 0.0 | 0.041 | 0.012 | 0.040 | 0.014 | 0.019 | 0.040 |
| 1F | (T/C) % | 98 | 99 | 100 | 113 | 107 | 111 | 108 | 106 | 109 |
| 1F | p-value | 0.44 | 0.47 | 0.79 | 0.00 | 0.05 | 0.00 | 0.00 | 0.00 | 0.00 |
| 1G | Event (T) | 162.7 | 5.4 | 9.8 | 0.370 | 0.184 | 0.382 | 0.189 | 0.334 | 0.511 |
| 1G | Control (C) | 162.7 | 5.3 | 9.6 | 0.328 | 0.167 | 0.349 | 0.169 | 0.315 | 0.465 |
| 1G | T − C | 0.0 | 0.1 | 0.2 | 0.042 | 0.017 | 0.033 | 0.020 | 0.020 | 0.046 |
| 1G | (T/C) % | 100 | 102 | 102 | 113 | 110 | 109 | 112 | 106 | 110 |
| 1G | p-value | 1.00 | 0.17 | 0.26 | 0.00 | 0.01 | 0.00 | 0.00 | 0.00 | 0.00 |

TABLE 22
Summary of field data for Construct 1 by year. Numbers shown in bold are significantly different from the control
at the p-value shown. bu/a is bushels per acre. “All” indicates the average across both years. (T/C) % is the
value for the transgenic hybrid combination (T) expressed as a percent of the control (C).

| | | Yield | Oil | Protein | Arg | Cys | Lys | Met | Thr | Val |
|---|---|---|---|---|---|---|---|---|---|---|
| | | (bu/a) | (%) | (%) | (%) | (%) | (%) | (%) | (%) | (%) |
| Year | Description | p < 0.1 | p < 0.05 | p < 0.05 | p < 0.05 | p < 0.05 | p < 0.05 | p < 0.05 | p < 0.05 | p < 0.05 |
| All | (T/C) % | 96 | 104 | 105 | 114 | 107 | 115 | 110 | 106 | 109 |
| 2 | (T/C) % | 97 | 102 | 106 | 111 | 110 | 105 | 109 | 105 | 109 |
| 1 | (T/C) % | 98 | 104 | 104 | 114 | 104 | 117 | 109 | 105 | 108 |

TABLE 23
Field data for Construct 1 by year. Numbers shown in bold are significantly different from the control at the p-value
shown. bu/a is bushels per acre. “All” indicates the average across all events or all years. (T/C) % is the value
for the transgenic hybrid combination (T) expressed as a percent of the control (C). T − C is the transgenic hybrid
combination minus the control. Oil, protein, and amino acid content are shown as percent of seed dry weight.

| | | | Yield | Oil | Protein | Arg | Cys | Lys | Met | Thr | Val |
|---|---|---|---|---|---|---|---|---|---|---|---|
| | | | (bu/a) | (%) | (%) | (%) | (%) | (%) | (%) | (%) | (%) |
| Event | Year | Description | p < 0.1 | p < 0.05 | p < 0.05 | p < 0.05 | p < 0.05 | p < 0.05 | p < 0.05 | p < 0.05 | p < 0.05 |
| All | All | Construct (T) | 173.2 | 4.8 | 9.9 | 0.350 | 0.163 | 0.366 | 0.176 | 0.317 | 0.505 |
| All | All | Control (C) | 180.2 | 4.6 | 9.4 | 0.308 | 0.152 | 0.319 | 0.160 | 0.298 | 0.462 |
| All | All | T − C | −7.0 | 0.2 | 0.4 | 0.042 | 0.011 | 0.047 | 0.016 | 0.019 | 0.043 |
| All | All | (T/C) % | 96 | 104 | 105 | 114 | 107 | 115 | 110 | 106 | 109 |
| All | All | p-value | 0.01 | 0.00 | 0.00 | 0.00 | 0.02 | 0.00 | 0.00 | 0.00 | 0.00 |
| All | 2 | Construct (T) | 166.4 | 4.9 | 10.0 | 0.363 | 0.172 | 0.377 | 0.186 | 0.333 | 0.521 |
| All | 2 | Control (C) | 172.2 | 4.8 | 9.4 | 0.327 | 0.156 | 0.360 | 0.170 | 0.316 | 0.478 |
| All | 2 | T − C | −5.8 | 0.1 | 0.6 | 0.036 | 0.016 | 0.016 | 0.016 | 0.017 | 0.043 |
| All | 2 | (T/C) % | 97 | 102 | 106 | 111 | 110 | 105 | 109 | 105 | 109 |
| All | 2 | p-value | 0.08 | 0.18 | 0.03 | 0.01 | 0.12 | 0.19 | 0.06 | 0.03 | 0.00 |
| All | 1 | Construct (T) | 183.0 | 4.8 | 9.7 | 0.344 | 0.157 | 0.360 | 0.168 | 0.307 | 0.496 |
| All | 1 | Control (C) | 187.5 | 4.6 | 9.4 | 0.303 | 0.152 | 0.307 | 0.155 | 0.292 | 0.457 |
| All | 1 | T − C | −4.5 | 0.2 | 0.3 | 0.041 | 0.005 | 0.053 | 0.013 | 0.015 | 0.039 |
| All | 1 | (T/C) % | 98 | 104 | 104 | 114 | 104 | 117 | 109 | 105 | 108 |
| All | 1 | p-value | 0.07 | 0.00 | 0.02 | 0.00 | 0.21 | 0.00 | 0.00 | 0.00 | 0.00 |
| 1A | All | Event (T) | 169.8 | 4.7 | 9.9 | 0.345 | 0.154 | 0.357 | 0.175 | 0.313 | 0.500 |
| 1A | All | Control (C) | 180.8 | 4.6 | 9.4 | 0.309 | 0.153 | 0.320 | 0.160 | 0.298 | 0.462 |
| 1A | All | T − C | −11.0 | 0.1 | 0.4 | 0.036 | 0.001 | 0.037 | 0.015 | 0.015 | 0.038 |
| 1A | All | (T/C) % | 94 | 102 | 105 | 112 | 101 | 112 | 109 | 105 | 108 |
| 1A | All | p-value | 0.03 | 0.27 | 0.04 | 0.00 | 0.81 | 0.00 | 0.01 | 0.05 | 0.00 |
| 1A | 2 | Event (T) | 161.6 | 4.8 | 10.1 | 0.356 | 0.158 | 0.358 | 0.179 | 0.328 | 0.517 |
| 1A | 2 | Control (C) | 172.2 | 4.8 | 9.5 | 0.327 | 0.158 | 0.359 | 0.171 | 0.317 | 0.479 |
| 1A | 2 | T − C | −10.6 | 0.0 | 0.6 | 0.028 | −0.001 | −0.001 | 0.008 | 0.012 | 0.038 |
| 1A | 2 | (T/C) % | 94 | 100 | 106 | 109 | 100 | 100 | 105 | 104 | 108 |
| 1A | 2 | p-value | 0.08 | 1.00 | 0.15 | 0.20 | 0.97 | 0.98 | 0.45 | 0.38 | 0.10 |
| 1A | 1 | Event (T) | 181.0 | 4.7 | 9.7 | 0.339 | 0.153 | 0.357 | 0.170 | 0.303 | 0.491 |
| 1A | 1 | Control (C) | 187.5 | 4.6 | 9.4 | 0.303 | 0.152 | 0.307 | 0.154 | 0.293 | 0.459 |
| 1A | 1 | T − C | −6.5 | 0.1 | 0.3 | 0.036 | 0.002 | 0.050 | 0.016 | 0.010 | 0.032 |
| 1A | 1 | (T/C) % | 97 | 102 | 103 | 112 | 101 | 116 | 110 | 103 | 107 |
| 1A | 1 | p-value | 0.19 | 0.20 | 0.28 | 0.00 | 0.83 | 0.00 | 0.01 | 0.17 | 0.01 |
| 1B | All | Event (T) | 179.1 | 4.9 | 9.8 | 0.348 | 0.164 | 0.356 | 0.176 | 0.318 | 0.505 |
| 1B | All | Control (C) | 181.2 | 4.6 | 9.4 | 0.309 | 0.152 | 0.320 | 0.160 | 0.298 | 0.462 |
| 1B | All | T − C | −2.1 | 0.3 | 0.4 | 0.039 | 0.012 | 0.036 | 0.016 | 0.020 | 0.043 |
| 1B | All | (T/C) % | 99 | 107 | 104 | 113 | 108 | 111 | 110 | 107 | 109 |
| 1B | All | p-value | 0.68 | 0.00 | 0.06 | 0.00 | 0.15 | 0.00 | 0.01 | 0.01 | 0.00 |
| 1B | 2 | Event (T) | 167.7 | 4.9 | 10.1 | 0.365 | 0.177 | 0.360 | 0.190 | 0.340 | 0.530 |
| 1B | 2 | Control (C) | 172.2 | 4.8 | 9.5 | 0.330 | 0.158 | 0.361 | 0.171 | 0.317 | 0.481 |
| 1B | 2 | T − C | −4.5 | 0.1 | 0.6 | 0.035 | 0.019 | −0.001 | 0.019 | 0.022 | 0.049 |
| 1B | 2 | (T/C) % | 97 | 103 | 107 | 111 | 112 | 100 | 111 | 107 | 110 |
| 1B | 2 | p-value | 0.44 | 0.29 | 0.10 | 0.12 | 0.26 | 0.96 | 0.13 | 0.09 | 0.02 |
| 1B | 1 | Event (T) | 189.2 | 4.9 | 9.5 | 0.331 | 0.151 | 0.353 | 0.162 | 0.298 | 0.480 |
| 1B | 1 | Control (C) | 187.5 | 4.6 | 9.4 | 0.303 | 0.152 | 0.306 | 0.154 | 0.293 | 0.458 |
| 1B | 1 | T − C | 1.7 | 0.3 | 0.1 | 0.028 | −0.001 | 0.048 | 0.007 | 0.006 | 0.021 |
| 1B | 1 | (T/C) % | 101 | 107 | 101 | 109 | 100 | 116 | 105 | 102 | 105 |
| 1B | 1 | p-value | 0.71 | 0.00 | 0.71 | 0.02 | 0.93 | 0.00 | 0.17 | 0.45 | 0.09 |
| 1C | All | Event (T) | 172.7 | 4.7 | 10.4 | 0.354 | 0.170 | 0.355 | 0.180 | 0.321 | 0.514 |
| 1C | All | Control (C) | 181.4 | 4.6 | 9.4 | 0.309 | 0.152 | 0.320 | 0.160 | 0.298 | 0.462 |
| 1C | All | T − C | −8.7 | 0.1 | 0.9 | 0.045 | 0.018 | 0.035 | 0.020 | 0.023 | 0.052 |
| 1C | All | (T/C) % | 95 | 102 | 110 | 115 | 112 | 111 | 112 | 108 | 111 |
| 1C | All | p-value | 0.08 | 0.35 | 0.00 | 0.00 | 0.02 | 0.00 | 0.00 | 0.00 | 0.00 |
| 1C | 2 | Event (T) | 167.3 | 4.7 | 11.1 | 0.357 | 0.190 | 0.344 | 0.195 | 0.332 | 0.524 |
| 1C | 2 | Control (C) | 172.2 | 4.7 | 9.7 | 0.330 | 0.161 | 0.355 | 0.173 | 0.319 | 0.484 |
| 1C | 2 | T − C | −4.9 | −0.1 | 1.4 | 0.027 | 0.030 | −0.011 | 0.022 | 0.013 | 0.040 |
| 1C | 2 | (T/C) % | 97 | 98 | 115 | 108 | 119 | 97 | 113 | 104 | 108 |
| 1C | 2 | p-value | 0.40 | 0.53 | 0.01 | 0.30 | 0.15 | 0.60 | 0.16 | 0.42 | 0.17 |
| 1C | 1 | Event (T) | 177.3 | 4.8 | 10.1 | 0.359 | 0.162 | 0.364 | 0.170 | 0.317 | 0.516 |
| 1C | 1 | Control (C) | 187.5 | 4.6 | 9.4 | 0.304 | 0.152 | 0.307 | 0.154 | 0.293 | 0.459 |
| 1C | 1 | T − C | −10.2 | 0.2 | 0.7 | 0.055 | 0.010 | 0.057 | 0.016 | 0.024 | 0.057 |
| 1C | 1 | (T/C) % | 95 | 104 | 107 | 118 | 106 | 119 | 110 | 108 | 112 |
| 1C | 1 | p-value | 0.03 | 0.01 | 0.01 | 0.00 | 0.17 | 0.00 | 0.00 | 0.00 | 0.00 |
| 1D | All | Event (T) | 169.6 | 4.7 | 9.8 | 0.343 | 0.158 | 0.364 | 0.172 | 0.311 | 0.495 |
| 1D | All | Control (C) | 180.5 | 4.6 | 9.4 | 0.309 | 0.152 | 0.320 | 0.160 | 0.298 | 0.462 |
| 1D | All | T − C | −10.9 | 0.1 | 0.4 | 0.034 | 0.006 | 0.044 | 0.012 | 0.013 | 0.033 |
| 1D | All | (T/C) % | 94 | 102 | 104 | 111 | 104 | 114 | 108 | 104 | 107 |
| 1D | All | p-value | 0.04 | 0.05 | 0.08 | 0.00 | 0.43 | 0.00 | 0.03 | 0.09 | 0.00 |
| 1D | 2 | Event (T) | 160.4 | 4.9 | 10.6 | 0.367 | 0.178 | 0.378 | 0.185 | 0.333 | 0.523 |
| 1D | 2 | Control (C) | 172.2 | 4.7 | 9.7 | 0.330 | 0.161 | 0.355 | 0.173 | 0.319 | 0.484 |
| 1D | 2 | T − C | −11.8 | 0.2 | 0.9 | 0.037 | 0.017 | 0.023 | 0.012 | 0.014 | 0.039 |
| 1D | 2 | (T/C) % | 93 | 104 | 109 | 111 | 111 | 107 | 107 | 104 | 108 |
| 1D | 2 | p-value | 0.08 | 0.05 | 0.01 | 0.12 | 0.27 | 0.38 | 0.36 | 0.29 | 0.10 |
| 1D | 1 | Event (T) | 182.9 | 4.7 | 9.5 | 0.333 | 0.149 | 0.355 | 0.164 | 0.301 | 0.485 |
| 1D | 1 | Control (C) | 187.5 | 4.6 | 9.4 | 0.304 | 0.152 | 0.308 | 0.154 | 0.293 | 0.459 |
| 1D | 1 | T − C | −4.5 | 0.1 | 0.0 | 0.029 | −0.003 | 0.048 | 0.010 | 0.008 | 0.026 |
| 1D | 1 | (T/C) % | 98 | 103 | 100 | 110 | 98 | 116 | 106 | 103 | 106 |
| 1D | 1 | p-value | 0.33 | 0.11 | 0.88 | 0.01 | 0.68 | 0.00 | 0.05 | 0.26 | 0.02 |
| 1E | All | Event (T) | 178.2 | 4.8 | 9.6 | 0.353 | 0.158 | 0.376 | 0.172 | 0.316 | 0.505 |
| 1E | All | Control (C) | 182.1 | 4.6 | 9.4 | 0.309 | 0.153 | 0.320 | 0.160 | 0.298 | 0.462 |
| 1E | All | T − C | −3.9 | 0.2 | 0.2 | 0.044 | 0.005 | 0.056 | 0.012 | 0.018 | 0.043 |
| 1E | All | (T/C) % | 98 | 104 | 102 | 114 | 103 | 118 | 108 | 106 | 109 |
| 1E | All | p-value | 0.41 | 0.05 | 0.47 | 0.00 | 0.39 | 0.00 | 0.03 | 0.02 | 0.00 |
| 1E | 2 | Event (T) | 174.2 | 4.8 | 9.8 | 0.376 | 0.177 | 0.389 | 0.182 | 0.341 | 0.535 |
| 1E | 2 | Control (C) | 172.2 | 4.7 | 9.7 | 0.330 | 0.161 | 0.355 | 0.173 | 0.319 | 0.484 |
| 1E | 2 | T − C | 2.0 | 0.1 | 0.1 | 0.047 | 0.016 | 0.034 | 0.009 | 0.022 | 0.051 |
| 1E | 2 | (T/C) % | 101 | 102 | 101 | 114 | 110 | 110 | 105 | 107 | 111 |
| 1E | 2 | p-value | 0.66 | 0.42 | 0.80 | 0.04 | 0.25 | 0.10 | 0.42 | 0.11 | 0.02 |
| 1E | 1 | Event (T) | 180.7 | 4.8 | 9.6 | 0.342 | 0.149 | 0.368 | 0.163 | 0.302 | 0.490 |
| 1E | 1 | Control (C) | 187.5 | 4.6 | 9.4 | 0.302 | 0.151 | 0.306 | 0.154 | 0.292 | 0.458 |
| 1E | 1 | T − C | −6.8 | 0.2 | 0.2 | 0.039 | −0.002 | 0.062 | 0.010 | 0.010 | 0.032 |
| 1E | 1 | (T/C) % | 96 | 105 | 102 | 113 | 99 | 120 | 106 | 103 | 107 |
| 1E | 1 | p-value | 0.19 | 0.01 | 0.56 | 0.00 | 0.75 | 0.00 | 0.06 | 0.18 | 0.01 |
| 1F | All | Event (T) | 174.6 | 4.7 | 9.8 | 0.347 | 0.168 | 0.362 | 0.180 | 0.316 | 0.502 |
| 1F | All | Control (C) | 181.3 | 4.6 | 9.4 | 0.309 | 0.152 | 0.320 | 0.160 | 0.298 | 0.462 |
| 1F | All | T − C | −6.7 | 0.1 | 0.4 | 0.038 | 0.016 | 0.042 | 0.020 | 0.018 | 0.040 |
| 1F | All | (T/C) % | 96 | 102 | 104 | 112 | 111 | 113 | 112 | 106 | 109 |
| 1F | All | p-value | 0.16 | 0.14 | 0.06 | 0.00 | 0.03 | 0.00 | 0.00 | 0.02 | 0.00 |
| 1F | 2 | Event (T) | 165.9 | 4.8 | 10.0 | 0.357 | 0.179 | 0.378 | 0.192 | 0.334 | 0.523 |
| 1F | 2 | Control (C) | 172.2 | 4.7 | 9.7 | 0.327 | 0.159 | 0.355 | 0.173 | 0.317 | 0.481 |
| 1F | 2 | T − C | −6.3 | 0.1 | 0.3 | 0.030 | 0.020 | 0.022 | 0.020 | 0.017 | 0.042 |
| 1F | 2 | (T/C) % | 96 | 102 | 103 | 109 | 113 | 106 | 112 | 105 | 109 |
| 1F | 2 | p-value | 0.16 | 0.43 | 0.32 | 0.19 | 0.18 | 0.29 | 0.13 | 0.22 | 0.09 |
| 1F | 1 | Event (T) | 188.6 | 4.7 | 9.8 | 0.342 | 0.162 | 0.353 | 0.170 | 0.306 | 0.492 |
| 1F | 1 | Control (C) | 187.5 | 4.6 | 9.4 | 0.303 | 0.151 | 0.307 | 0.154 | 0.292 | 0.457 |
| 1F | 1 | T − C | 1.1 | 0.1 | 0.3 | 0.040 | 0.011 | 0.046 | 0.016 | 0.014 | 0.035 |
| 1F | 1 | (T/C) % | 101 | 102 | 104 | 113 | 107 | 115 | 110 | 105 | 108 |
| 1F | 1 | p-value | 0.83 | 0.20 | 0.16 | 0.00 | 0.16 | 0.00 | 0.00 | 0.07 | 0.01 |
| 1G | All | Event (T) | 173.8 | 4.9 | 9.9 | 0.365 | 0.171 | 0.380 | 0.184 | 0.325 | 0.521 |
| 1G | All | Control (C) | 181.0 | 4.6 | 9.4 | 0.309 | 0.153 | 0.320 | 0.160 | 0.298 | 0.462 |
| 1G | All | T − C | −7.2 | 0.3 | 0.5 | 0.056 | 0.018 | 0.060 | 0.024 | 0.027 | 0.059 |
| 1G | All | (T/C) % | 96 | 107 | 105 | 118 | 112 | 119 | 115 | 109 | 113 |
| 1G | All | p-value | 0.14 | 0.00 | 0.03 | 0.00 | 0.01 | 0.00 | 0.00 | 0.00 | 0.00 |
| 1G | 2 | Event (T) | 165.5 | 5.0 | 10.0 | 0.381 | 0.176 | 0.402 | 0.196 | 0.337 | 0.537 |
| 1G | 2 | Control (C) | 172.2 | 4.7 | 9.7 | 0.330 | 0.161 | 0.355 | 0.173 | 0.319 | 0.484 |
| 1G | 2 | T − C | −6.7 | 0.3 | 0.3 | 0.052 | 0.015 | 0.047 | 0.023 | 0.019 | 0.053 |
| 1G | 2 | (T/C) % | 96 | 106 | 103 | 116 | 110 | 113 | 113 | 106 | 111 |
| 1G | 2 | p-value | 0.19 | 0.02 | 0.38 | 0.04 | 0.36 | 0.04 | 0.05 | 0.21 | 0.03 |
| 1G | 1 | Event (T) | 181.0 | 4.9 | 10.0 | 0.361 | 0.171 | 0.368 | 0.175 | 0.320 | 0.518 |
| 1G | 1 | Control (C) | 187.5 | 4.6 | 9.4 | 0.304 | 0.151 | 0.308 | 0.154 | 0.293 | 0.459 |
| 1G | 1 | T − C | −6.4 | 0.3 | 0.6 | 0.057 | 0.020 | 0.061 | 0.020 | 0.028 | 0.060 |
| 1G | 1 | (T/C) % | 97 | 106 | 106 | 119 | 113 | 120 | 113 | 109 | 113 |
| 1G | 1 | p-value | 0.19 | 0.00 | 0.03 | 0.00 | 0.01 | 0.00 | 0.00 | 0.00 | 0.00 |

TABLE 24
Summary of field data for Construct 2. Numbers shown in bold are significantly different from the control at the
p-value shown. bu/a is bushels per acre. “All” indicates the average across all events or testers. (T/C) % is the
value for the transgenic hybrid combination (T) expressed as a percent of the control (C).

| | | Yield | Oil | Prot | Arg | Cys | Lys | Met | Thr | Val |
|---|---|---|---|---|---|---|---|---|---|---|
| | | (bu/a) | (%) | (%) | (%) | (%) | (%) | (%) | (%) | (%) |
| Event | Description | (p <= 0.10) | (p <= 0.15) | (p <= 0.15) | (p <= 0.15) | (p <= 0.15) | (p <= 0.15) | (p <= 0.15) | (p <= 0.15) | (p <= 0.15) |
| All | (T/C) % | 100 | 102 | 101 | 99 | 99 | 100 | 99 | 100 | 100 |
| 2H | (T/C) % | 98 | 108 | 93 | 95 | 91 | 100 | 95 | 95 | 94 |
| 2I | (T/C) % | 97 | 104 | 99 | 99 | 104 | 100 | 101 | 100 | 99 |
| 2J | (T/C) % | 100 | 103 | 102 | 101 | 99 | 103 | 100 | 102 | 101 |
| 2K | (T/C) % | 102 | 105 | 97 | 96 | 92 | 100 | 98 | 99 | 97 |
| 2L | (T/C) % | 100 | 96 | 105 | 102 | 105 | 101 | 104 | 103 | 103 |
| 2M | (T/C) % | 104 | 107 | 108 | 105 | 107 | 102 | 108 | 106 | 106 |
| 2N | (T/C) % | 100 | 98 | 101 | 99 | 103 | 101 | 99 | 98 | 100 |
| 2O | (T/C) % | 98 | 99 | 101 | 100 | 107 | 98 | 101 | 102 | 102 |
| 2P | (T/C) % | 102 | 106 | 100 | 100 | 91 | 105 | 91 | 99 | 99 |

TABLE 25
Field data for Construct 2. Numbers shown in bold are significantly different from the control at the p-value shown.
bu/a is bushels per acre. “All” indicates the average across all events or testers. (T/C) % is the value for the transgenic
hybrid combination (T) expressed as a percent of the control (C). T − C is the transgenic hybrid combination minus
the control. Oil, protein, and amino acid content are shown as percent of seed dry weight.

| | | Yield | Oil | Prot | Arg | Cys | Lys | Met | Thr | Val |
|---|---|---|---|---|---|---|---|---|---|---|
| | | (bu/a) | (%) | (%) | (%) | (%) | (%) | (%) | (%) | (%) |
| Event | Description | (p <= 0.10) | (p <= 0.15) | (p <= 0.15) | (p <= 0.15) | (p <= 0.15) | (p <= 0.15) | (p <= 0.15) | (p <= 0.15) | (p <= 0.15) |
| All | Construct | 188.1 | 4.3 | 9.7 | 0.321 | 0.159 | 0.322 | 0.168 | 0.302 | 0.472 |
| | (T) | | | | | | | | | |
| All | Control (C) | 187.8 | 4.2 | 9.6 | 0.325 | 0.161 | 0.323 | 0.170 | 0.301 | 0.473 |
| All | T − C | 0.3 | 0.1 | 0.1 | −0.004 | −0.002 | 0.000 | −0.002 | 0.001 | −0.001 |
| All | (T/C) % | 100 | 102 | 101 | 99 | 99 | 100 | 99 | 100 | 100 |
| All | p-value | 0.76 | 0.23 | 0.70 | 0.48 | 0.62 | 0.94 | 0.21 | 0.83 | 0.87 |
| 2H | Event (T) | 186.0 | 4.5 | 9.1 | 0.308 | 0.146 | 0.315 | 0.161 | 0.285 | 0.449 |
| 2H | Control (C) | 189.3 | 4.2 | 9.8 | 0.323 | 0.159 | 0.314 | 0.169 | 0.299 | 0.475 |
| 2H | T − C | −3.2 | 0.3 | −0.7 | −0.015 | −0.014 | 0.001 | −0.008 | −0.014 | −0.026 |
| 2H | (T/C) % | 98 | 108 | 93 | 95 | 91 | 100 | 95 | 95 | 94 |
| 2H | p-value | 0.75 | 0.03 | 0.24 | 0.37 | 0.12 | 0.92 | 0.11 | 0.27 | 0.24 |
| 2I | Event (T) | 183.8 | 4.4 | 9.5 | 0.320 | 0.168 | 0.320 | 0.171 | 0.300 | 0.469 |
| 2I | Control (C) | 188.9 | 4.2 | 9.6 | 0.323 | 0.160 | 0.320 | 0.170 | 0.301 | 0.473 |
| 2I | T − C | −5.1 | 0.2 | −0.1 | −0.003 | 0.007 | 0.000 | 0.001 | 0.000 | −0.004 |
| 2I | (T/C) % | 97 | 104 | 99 | 99 | 104 | 100 | 101 | 100 | 99 |
| 2I | p-value | 0.31 | 0.23 | 0.49 | 0.83 | 0.47 | 0.96 | 0.72 | 0.95 | 0.74 |
| 2J | Event (T) | 188.4 | 4.3 | 9.8 | 0.329 | 0.160 | 0.331 | 0.169 | 0.308 | 0.479 |
| 2J | Control (C) | 187.8 | 4.2 | 9.6 | 0.325 | 0.161 | 0.323 | 0.170 | 0.301 | 0.473 |
| 2J | T − C | 0.6 | 0.1 | 0.2 | 0.004 | −0.002 | 0.009 | −0.001 | 0.007 | 0.006 |
| 2J | (T/C) % | 100 | 103 | 102 | 101 | 99 | 103 | 100 | 102 | 101 |
| 2J | p-value | 0.87 | 0.26 | 0.47 | 0.60 | 0.86 | 0.26 | 0.91 | 0.49 | 0.74 |
| 2K | Event (T) | 191.0 | 4.4 | 9.5 | 0.314 | 0.149 | 0.323 | 0.167 | 0.300 | 0.462 |
| 2K | Control (C) | 187.8 | 4.2 | 9.7 | 0.328 | 0.162 | 0.324 | 0.170 | 0.302 | 0.477 |
| 2K | T − C | 3.2 | 0.2 | −0.3 | −0.014 | −0.013 | −0.001 | −0.003 | −0.003 | −0.015 |
| 2K | (T/C) % | 102 | 105 | 97 | 96 | 92 | 100 | 98 | 99 | 97 |
| 2K | p-value | 0.52 | 0.09 | 0.48 | 0.30 | 0.08 | 0.87 | 0.11 | 0.77 | 0.41 |
| 2L | Event (T) | 187.2 | 4.1 | 10.1 | 0.329 | 0.166 | 0.319 | 0.174 | 0.307 | 0.484 |
| 2L | Control (C) | 187.7 | 4.2 | 9.6 | 0.321 | 0.158 | 0.315 | 0.167 | 0.298 | 0.470 |
| 2L | T − C | −0.5 | −0.2 | 0.5 | 0.008 | 0.008 | 0.004 | 0.006 | 0.009 | 0.014 |
| 2L | (T/C) % | 100 | 96 | 105 | 102 | 105 | 101 | 104 | 103 | 103 |
| 2L | p-value | 0.96 | 0.20 | 0.16 | 0.32 | 0.08 | 0.87 | 0.02 | 0.16 | 0.02 |
| 2M | Event (T) | 194.7 | 4.5 | 10.2 | 0.340 | 0.173 | 0.331 | 0.183 | 0.318 | 0.497 |
| 2M | Control (C) | 187.8 | 4.2 | 9.5 | 0.324 | 0.162 | 0.324 | 0.170 | 0.299 | 0.470 |
| 2M | T − C | 6.9 | 0.3 | 0.7 | 0.016 | 0.011 | 0.006 | 0.013 | 0.019 | 0.028 |
| 2M | (T/C) % | 104 | 107 | 108 | 105 | 107 | 102 | 108 | 106 | 106 |
| 2M | p-value | 0.39 | 0.04 | 0.07 | 0.50 | 0.41 | 0.69 | 0.11 | 0.27 | 0.30 |
| 2N | Event (T) | 187.6 | 4.2 | 9.6 | 0.316 | 0.163 | 0.319 | 0.165 | 0.291 | 0.468 |
| 2N | Control (C) | 187.8 | 4.2 | 9.5 | 0.319 | 0.158 | 0.317 | 0.168 | 0.297 | 0.467 |
| 2N | T − C | −0.3 | −0.1 | 0.1 | −0.003 | 0.004 | 0.002 | −0.002 | −0.005 | 0.001 |
| 2N | (T/C) % | 100 | 98 | 101 | 99 | 103 | 101 | 99 | 98 | 100 |
| 2N | p-value | 0.96 | 0.41 | 0.77 | 0.85 | 0.71 | 0.82 | 0.75 | 0.61 | 0.92 |
| 2O | Event (T) | 184.7 | 4.2 | 9.8 | 0.328 | 0.173 | 0.316 | 0.172 | 0.307 | 0.486 |
| 2O | Control (C) | 187.8 | 4.2 | 9.8 | 0.328 | 0.161 | 0.322 | 0.171 | 0.300 | 0.479 |
| 2O | T − C | −3.1 | −0.1 | 0.1 | 0.000 | 0.012 | −0.006 | 0.002 | 0.007 | 0.007 |
| 2O | (T/C) % | 98 | 99 | 101 | 100 | 107 | 98 | 101 | 102 | 102 |
| 2O | p-value | 0.39 | 0.50 | 0.82 | 1.00 | 0.15 | 0.48 | 0.70 | 0.55 | 0.57 |
| 2P | Event (T) | 190.6 | 4.4 | 9.7 | 0.322 | 0.145 | 0.335 | 0.155 | 0.296 | 0.466 |
| 2P | Control (C) | 186.8 | 4.2 | 9.6 | 0.322 | 0.158 | 0.318 | 0.170 | 0.299 | 0.473 |
| 2P | T − C | 3.9 | 0.3 | 0.0 | 0.000 | −0.014 | 0.017 | −0.015 | −0.003 | −0.007 |
| 2P | (T/C) % | 102 | 106 | 100 | 100 | 91 | 105 | 91 | 99 | 99 |
| 2P | p-value | 0.43 | 0.08 | 0.94 | 0.99 | 0.19 | 0.17 | 0.05 | 0.76 | 0.65 |

TABLE 26
Summary of field data for Construct 3 for Year 1. Numbers shown in bold are significantly different from the control
at the p-value shown. bu/a is bushels per acre. “All” indicates the average across all events or testers. (T/C) %
is the value for the transgenic hybrid combination (T) expressed as a percent of the control (C).

| | | Yield | Oil | Prot | Arg | Cys | Lys | Met | Thr | Val |
|---|---|---|---|---|---|---|---|---|---|---|
| | | (bu/a) | (%) | (%) | (%) | (%) | (%) | (%) | (%) | (%) |
| Event | Description | p <= 0.10 | p <= 0.15 | p <= 0.15 | p <= 0.15 | p <= 0.15 | p <= 0.15 | p <= 0.15 | p <= 0.15 | p <= 0.15 |
| All | (T/C) % | 100 | 104 | 99 | 114 | 104 | 119 | 106 | 105 | 109 |
| 3Q | (T/C) % | 102 | 104 | 98 | 118 | 107 | 123 | 109 | 106 | 111 |
| 3R | (T/C) % | 105 | 104 | 97 | 107 | 99 | 113 | 99 | 104 | 104 |
| 3S | (T/C) % | 94 | 106 | 101 | 124 | 117 | 123 | 122 | 110 | 116 |
| 3T | (T/C) % | 100 | 106 | 95 | 106 | 98 | 118 | 98 | 102 | 103 |
| 3U | (T/C) % | 97 | 96 | 100 | 99 | 94 | 100 | 90 | 98 | 99 |

TABLE 27
Field data for Construct 3 for Year 1. Numbers shown in bold are significantly different from the control at the p-value
shown. bu/a is bushels per acre. “All” indicates the average across all events or testers. (T/C) % is the value for the
transgenic hybrid combination (T) expressed as a percent of the control (C). T − C is the transgenic hybrid combination
minus the control. Oil, protein, and amino acid content are shown as percent of seed dry weight.

| | | Yield | Oil | Prot | Arg | Cys | Lys | Met | Thr | Val |
|---|---|---|---|---|---|---|---|---|---|---|
| | | (bu/a) | (%) | (%) | (%) | (%) | (%) | (%) | (%) | (%) |
| Event | Description | p <= 0.10 | p <= 0.15 | p <= 0.15 | p <= 0.15 | p <= 0.15 | p <= 0.15 | p <= 0.15 | p <= 0.15 | p <= 0.15 |
| All | Construct (T) | 155.1 | 5.0 | 8.8 | 0.336 | 0.156 | 0.407 | 0.162 | 0.318 | 0.471 |
| All | Control (C) | 155.2 | 4.8 | 8.9 | 0.296 | 0.150 | 0.343 | 0.153 | 0.302 | 0.434 |
| All | T − C | −0.1 | 0.2 | −0.1 | 0.040 | 0.006 | 0.064 | 0.009 | 0.016 | 0.037 |
| All | (T/C) % | 100 | 104 | 99 | 114 | 104 | 119 | 106 | 105 | 109 |
| All | p-value | 0.98 | 0.11 | 0.59 | 0.00 | 0.31 | 0.00 | 0.19 | 0.03 | 0.01 |
| 3Q | Event (T) | 159.0 | 5.0 | 8.7 | 0.348 | 0.161 | 0.423 | 0.167 | 0.320 | 0.483 |
| 3Q | Control (C) | 155.2 | 4.8 | 8.9 | 0.296 | 0.150 | 0.343 | 0.153 | 0.302 | 0.434 |
| 3Q | T − C | 3.8 | 0.2 | −0.2 | 0.052 | 0.011 | 0.080 | 0.014 | 0.018 | 0.049 |
| 3Q | (T/C) % | 102 | 104 | 98 | 118 | 107 | 123 | 109 | 106 | 111 |
| 3Q | p-value | 0.69 | 0.40 | 0.50 | 0.00 | 0.14 | 0.00 | 0.08 | 0.03 | 0.00 |
| 3R | Event (T) | 163.4 | 5.0 | 8.6 | 0.320 | 0.148 | 0.391 | 0.151 | 0.314 | 0.454 |
| 3R | Control (C) | 155.2 | 4.8 | 8.9 | 0.298 | 0.150 | 0.345 | 0.152 | 0.303 | 0.436 |
| 3R | T − C | 8.2 | 0.2 | −0.3 | 0.022 | −0.002 | 0.046 | −0.001 | 0.011 | 0.018 |
| 3R | (T/C) % | 105 | 104 | 97 | 107 | 99 | 113 | 99 | 104 | 104 |
| 3R | p-value | 0.40 | 0.37 | 0.24 | 0.05 | 0.66 | 0.01 | 0.93 | 0.17 | 0.10 |
| 3S | Event (T) | 145.5 | 5.1 | 9.0 | 0.368 | 0.175 | 0.422 | 0.186 | 0.331 | 0.504 |
| 3S | Control (C) | 155.2 | 4.8 | 8.9 | 0.296 | 0.150 | 0.343 | 0.153 | 0.302 | 0.434 |
| 3S | T − C | −9.7 | 0.3 | 0.1 | 0.072 | 0.025 | 0.079 | 0.033 | 0.029 | 0.070 |
| 3S | (T/C) % | 94 | 106 | 101 | 124 | 117 | 123 | 122 | 110 | 116 |
| 3S | p-value | 0.35 | 0.18 | 0.69 | 0.00 | 0.01 | 0.00 | 0.00 | 0.02 | 0.00 |
| 3T | Event (T) | 155.8 | 5.0 | 8.4 | 0.313 | 0.146 | 0.401 | 0.148 | 0.308 | 0.446 |
| 3T | Control (C) | 155.2 | 4.7 | 8.8 | 0.296 | 0.149 | 0.340 | 0.151 | 0.301 | 0.433 |
| 3T | T − C | 0.6 | 0.3 | −0.4 | 0.017 | −0.003 | 0.061 | −0.003 | 0.007 | 0.013 |
| 3T | (T/C) % | 100 | 106 | 95 | 106 | 98 | 118 | 98 | 102 | 103 |
| 3T | p-value | 0.95 | 0.26 | 0.04 | 0.12 | 0.54 | 0.00 | 0.56 | 0.30 | 0.21 |
| 3U | Event (T) | 145.9 | 5.2 | 9.2 | 0.305 | 0.138 | 0.373 | 0.138 | 0.305 | 0.438 |
| 3U | Control (C) | 149.7 | 5.4 | 9.2 | 0.309 | 0.147 | 0.373 | 0.153 | 0.311 | 0.443 |
| 3U | T − C | −3.8 | −0.2 | 0.0 | −0.004 | −0.009 | 0.000 | −0.015 | −0.006 | −0.005 |
| 3U | (T/C) % | 97 | 96 | 100 | 99 | 94 | 100 | 90 | 98 | 99 |
| 3U | p-value | 0.79 | 0.22 | 0.95 | 0.81 | 0.38 | 1.00 | 0.13 | 0.62 | 0.80 |

TABLE 28
Summary of field data for Construct 3 for Year 2. Numbers shown in bold are significantly different from the control
at the p-value shown. bu/a is bushels per acre. The events are an average over three testers. “All” indicates the
average across all events or testers. (T/C) % is the value for the transgenic hybrid combination (T) expressed as a
percent of the control (C).

| | | | | | | | | | | | Val |
|---|---|---|---|---|---|---|---|---|---|---|---|
| | | Yield | Oil | Prot | Arg | Cys | Ile | Lys | Met | Thr | (%) |
| | | (bu/a) | (%) | (%) | (%) | (%) | (%) | (%) | (%) | (%) | p <= |
| Event | Description | p <= 0.10 | p <= 0.05 | p <= 0.05 | p <= 0.05 | p <= 0.05 | p <= 0.05 | p <= 0.05 | p <= 0.05 | p <= 0.05 | 0.05 |
| All | (T/C) % | 95 | 100 | 98 | 110 | 104 | 102 | 115 | 106 | 104 | 106 |
| 3Q | (T/C) % | 99 | 100 | 98 | 111 | 105 | 102 | 117 | 109 | 104 | 107 |
| 3R | (T/C) % | 95 | 100 | 96 | 111 | 101 | 100 | 117 | 102 | 103 | 106 |
| 3S | (T/C) % | 92 | 98 | 101 | 110 | 103 | 103 | 114 | 104 | 104 | 107 |
| 3T | (T/C) % | 95 | 102 | 99 | 109 | 107 | 101 | 110 | 109 | 103 | 105 |

TABLE 29
Field data for Construct 3 for Year 2. Numbers shown in bold are significantly different from the control at the p-value
shown. bu/a is bushels per acre. The events are an average over three testers. “All” indicates the average across
all events or testers. (T/C) % is the value for the transgenic hybrid combination (T) expressed as a percent of the control (C).
T − C is the transgenic hybrid combination minus the control. Oil, protein, and amino acid content are shown as percent
of seed dry weight.

| | | | | | | | | | | | Val |
|---|---|---|---|---|---|---|---|---|---|---|---|
| | | Yield | Oil | Prot | Arg | Cys | Ile | Lys | Met | Thr | (%) |
| | | (bu/a) | (%) | (%) | (%) | (%) | (%) | (%) | (%) | (%) | p <= |
| Event | Description | p <= 0.10 | p <= 0.15 | p <= 0.15 | p <= 0.15 | p <= 0.15 | P <= 0.05 | p <= 0.15 | p <= 0.15 | p <= 0.15 | 0.15 |
| All | Construct | 168.3 | 4.0 | 9.7 | 0.506 | 0.232 | 0.374 | 0.402 | 0.235 | 0.485 | 0.573 |
| | (T) | | | | | | | | | | |
| All | Control (C) | 176.7 | 4.0 | 9.9 | 0.458 | 0.223 | 0.368 | 0.351 | 0.222 | 0.468 | 0.539 |
| All | T − C | −8.4 | 0.0 | −0.2 | 0.048 | 0.009 | 0.006 | 0.051 | 0.013 | 0.017 | 0.034 |
| All | (T/C) % | 95 | 100 | 98 | 110 | 104 | 102 | 115 | 106 | 104 | 106 |
| All | p-value | 0.06 | 0.72 | 0.61 | 0.01 | 0.14 | 0.20 | 0.01 | 0.02 | 0.04 | 0.04 |
| 3Q | Event (T) | 175.5 | 4.0 | 9.7 | 0.510 | 0.234 | 0.375 | 0.411 | 0.241 | 0.488 | 0.575 |
| 3Q | Control (C) | 176.7 | 4.0 | 9.9 | 0.458 | 0.223 | 0.368 | 0.351 | 0.222 | 0.468 | 0.539 |
| 3Q | T − C | −1.2 | 0.0 | −0.2 | 0.052 | 0.011 | 0.007 | 0.060 | 0.019 | 0.020 | 0.036 |
| 3Q | (T/C) % | 99 | 100 | 98 | 111 | 105 | 102 | 117 | 109 | 104 | 107 |
| 3Q | p-value | 0.48 | 0.55 | 0.57 | 0.05 | 0.53 | 0.48 | 0.00 | 0.06 | 0.19 | 0.14 |
| 3R | Event (T) | 167.9 | 4.0 | 9.5 | 0.509 | 0.226 | 0.369 | 0.411 | 0.226 | 0.483 | 0.572 |
| 3R | Control (C) | 176.7 | 4.0 | 9.9 | 0.458 | 0.223 | 0.368 | 0.351 | 0.222 | 0.468 | 0.539 |
| 3R | T − C | −8.8 | 0.0 | −0.4 | 0.051 | 0.003 | 0.001 | 0.060 | 0.004 | 0.015 | 0.033 |
| 3R | (T/C) % | 95 | 100 | 96 | 111 | 101 | 100 | 117 | 102 | 103 | 106 |
| 3R | p-value | 0.18 | 0.61 | 0.28 | 0.11 | 0.52 | 1.00 | 0.03 | 0.56 | 0.33 | 0.19 |
| 3S | Event (T) | 162.3 | 3.9 | 10.0 | 0.505 | 0.230 | 0.378 | 0.399 | 0.231 | 0.486 | 0.577 |
| 3S | Control (C) | 176.7 | 4.0 | 9.9 | 0.458 | 0.223 | 0.368 | 0.351 | 0.222 | 0.468 | 0.539 |
| 3S | T − C | −14.4 | −0.1 | 0.1 | 0.047 | 0.007 | 0.010 | 0.048 | 0.009 | 0.018 | 0.038 |
| 3S | (T/C) % | 92 | 98 | 101 | 110 | 103 | 103 | 114 | 104 | 104 | 107 |
| 3S | p-value | 0.00 | 0.08 | 0.76 | 0.02 | 0.12 | 0.12 | 0.00 | 0.01 | 0.09 | 0.06 |
| 3T | Event (T) | 167.9 | 4.1 | 9.8 | 0.498 | 0.238 | 0.373 | 0.387 | 0.241 | 0.481 | 0.566 |
| 3T | Control (C) | 176.7 | 4.0 | 9.9 | 0.458 | 0.223 | 0.368 | 0.351 | 0.222 | 0.468 | 0.539 |
| 3T | T − C | −8.8 | 0.1 | −0.1 | 0.040 | 0.015 | 0.005 | 0.036 | 0.019 | 0.013 | 0.027 |
| 3T | (T/C) % | 95 | 102 | 99 | 109 | 107 | 101 | 110 | 109 | 103 | 105 |
| 3T | p-value | 0.05 | 0.48 | 0.51 | 0.19 | 0.20 | 0.48 | 0.07 | 0.19 | 0.30 | 0.12 |

TABLE 30
Field data for Construct 3 by Year by Tester. Numbers shown in bold are significantly different from the control at the
p-value shown. bu/a is bushels per acre. “All” indicates the average across all events or years. (T/C) % is the value
for the transgenic hybrid combination (T) expressed as a percent of the control (C). T − C is the transgenic hybrid
combination minus the control. Oil, protein, and amino acid content are shown as percent of seed dry weight.

| | | | | Yield | Oil | Prot | Arg | Cys | Lys | Met | Thr | Val |
|---|---|---|---|---|---|---|---|---|---|---|---|---|
| | | | | (bu/a) | (%) | (%) | (%) | (%) | (%) | (%) | (%) | (%) |
| Event | Year | Tester | Description | p <= 0.10 | p <= 0.15 | p <= 0.15 | p <= 0.15 | p <= 0.15 | p <= 0.15 | p <= 0.15 | p <= 0.15 | p <= 0.15 |
| All | All | 1 | Construct (T) | 150.6 | 4.8 | 9.5 | 0.446 | 0.203 | 0.427 | 0.205 | 0.427 | 0.552 |
| All | All | 1 | Control (C) | 159.6 | 4.8 | 10.1 | 0.402 | 0.198 | 0.362 | 0.200 | 0.415 | 0.522 |
| All | All | 1 | T − C | −9.0 | 0.0 | −0.6 | 0.044 | 0.005 | 0.065 | 0.005 | 0.012 | 0.030 |
| All | All | 1 | (T/C) % | 94 | 100 | 94 | 111 | 103 | 118 | 102 | 103 | 106 |
| All | All | 1 | p-value | 0.16 | 0.98 | 0.05 | 0.02 | 0.57 | 0.00 | 0.60 | 0.28 | 0.11 |
| All | 1 | 1 | Construct (T) | 150.4 | 5.6 | 8.9 | 0.361 | 0.167 | 0.437 | 0.177 | 0.335 | 0.504 |
| All | 1 | 1 | Control (C) | 149.7 | 5.6 | 9.2 | 0.297 | 0.158 | 0.369 | 0.165 | 0.306 | 0.441 |
| All | 1 | 1 | T − C | 0.7 | 0.0 | −0.2 | 0.064 | 0.009 | 0.068 | 0.012 | 0.029 | 0.063 |
| All | 1 | 1 | (T/C) % | 100 | 100 | 97 | 122 | 106 | 118 | 107 | 109 | 114 |
| All | 1 | 1 | p-value | 0.87 | 0.70 | 0.49 | 0.07 | 0.44 | 0.01 | 0.29 | 0.06 | 0.06 |
| All | 2 | 1 | Construct (T) | 166.5 | 4.1 | 10.0 | 0.525 | 0.235 | 0.419 | 0.230 | 0.514 | 0.595 |
| All | 2 | 1 | Control (C) | 186.8 | 4.2 | 10.4 | 0.480 | 0.230 | 0.357 | 0.225 | 0.506 | 0.578 |
| All | 2 | 1 | T − C | −20.3 | −0.1 | −0.5 | 0.045 | 0.005 | 0.062 | 0.005 | 0.008 | 0.017 |
| All | 2 | 1 | (T/C) % | 89 | 98 | 95 | 109 | 102 | 117 | 102 | 102 | 103 |
| All | 2 | 1 | p-value | 0.00 | 0.59 | 0.03 | 0.02 | 0.52 | 0.00 | 0.74 | 0.48 | 0.32 |
| All | All | 2 | Construct (T) | 160.2 | 4.1 | 9.2 | 0.426 | 0.208 | 0.400 | 0.215 | 0.402 | 0.518 |
| All | All | 2 | Control (C) | 168.3 | 3.9 | 9.5 | 0.395 | 0.205 | 0.345 | 0.208 | 0.399 | 0.498 |
| All | All | 2 | T − C | −8.1 | 0.2 | −0.3 | 0.031 | 0.003 | 0.055 | 0.007 | 0.003 | 0.020 |
| All | All | 2 | (T/C) % | 95 | 105 | 97 | 108 | 101 | 116 | 103 | 101 | 104 |
| All | All | 2 | p-value | 0.28 | 0.01 | 0.21 | 0.02 | 0.75 | 0.00 | 0.38 | 0.69 | 0.13 |
| All | 1 | 2 | Construct (T) | 158.0 | 4.7 | 8.7 | 0.337 | 0.158 | 0.393 | 0.158 | 0.315 | 0.466 |
| All | 1 | 2 | Control (C) | 156.4 | 4.4 | 8.6 | 0.287 | 0.149 | 0.321 | 0.149 | 0.301 | 0.431 |
| All | 1 | 2 | T − C | 1.6 | 0.3 | 0.1 | 0.050 | 0.009 | 0.072 | 0.009 | 0.014 | 0.035 |
| All | 1 | 2 | (T/C) % | 101 | 107 | 101 | 117 | 106 | 122 | 106 | 105 | 108 |
| All | 1 | 2 | p-value | 0.76 | 0.01 | 0.75 | 0.01 | 0.30 | 0.00 | 0.36 | 0.20 | 0.09 |
| All | 2 | 2 | Construct (T) | 164.4 | 3.5 | 9.6 | 0.492 | 0.251 | 0.391 | 0.257 | 0.472 | 0.558 |
| All | 2 | 2 | Control (C) | 176.6 | 3.6 | 9.5 | 0.447 | 0.239 | 0.347 | 0.242 | 0.453 | 0.519 |
| All | 2 | 2 | T − C | −12.2 | −0.1 | 0.1 | 0.045 | 0.012 | 0.044 | 0.015 | 0.019 | 0.039 |
| All | 2 | 2 | (T/C) % | 93 | 97 | 101 | 110 | 105 | 113 | 106 | 104 | 108 |
| All | 2 | 2 | p-value | 0.02 | 0.58 | 0.64 | 0.01 | 0.22 | 0.00 | 0.08 | 0.04 | 0.01 |
| 3Q | All | 1 | Event (T) | 154.0 | 4.8 | 9.4 | 0.445 | 0.201 | 0.439 | 0.203 | 0.427 | 0.554 |
| 3Q | All | 1 | Control (C) | 159.6 | 4.9 | 9.6 | 0.381 | 0.186 | 0.365 | 0.187 | 0.401 | 0.500 |
| 3Q | All | 1 | T − C | −5.6 | −0.1 | −0.2 | 0.064 | 0.015 | 0.074 | 0.016 | 0.026 | 0.054 |
| 3Q | All | 1 | (T/C) % | 96 | 99 | 98 | 117 | 108 | 120 | 109 | 106 | 111 |
| 3Q | All | 1 | p-value | 0.46 | 0.57 | 0.41 | 0.00 | 0.04 | 0.00 | 0.15 | 0.02 | 0.00 |
| 3Q | 1 | 1 | Event (T) | 152.3 | 5.4 | 9.1 | 0.371 | 0.174 | 0.452 | 0.177 | 0.342 | 0.514 |
| 3Q | 1 | 1 | Control (C) | 149.7 | 5.4 | 9.1 | 0.301 | 0.148 | 0.366 | 0.157 | 0.306 | 0.436 |
| 3Q | 1 | 1 | T − C | 2.6 | 0.0 | 0.0 | 0.070 | 0.026 | 0.086 | 0.020 | 0.036 | 0.078 |
| 3Q | 1 | 1 | (T/C) % | 102 | 100 | 100 | 123 | 118 | 123 | 113 | 112 | 118 |
| 3Q | 1 | 1 | p-value | 0.86 | 0.94 | 0.91 | 0.00 | 0.06 | 0.01 | 0.16 | 0.01 | 0.00 |
| 3Q | 2 | 1 | Event (T) | 174.2 | 4.1 | 9.8 | 0.524 | 0.235 | 0.424 | 0.237 | 0.514 | 0.596 |
| 3Q | 2 | 1 | Control (C) | 186.8 | 4.2 | 10.4 | 0.476 | 0.227 | 0.359 | 0.223 | 0.505 | 0.576 |
| 3Q | 2 | 1 | T − C | −12.6 | −0.1 | −0.6 | 0.048 | 0.008 | 0.065 | 0.014 | 0.009 | 0.020 |
| 3Q | 2 | 1 | (T/C) % | 93 | 98 | 94 | 110 | 104 | 118 | 106 | 102 | 103 |
| 3Q | 2 | 1 | p-value | 0.01 | 0.53 | 0.33 | 0.19 | 0.58 | 0.00 | 0.20 | 0.70 | 0.61 |
| 3Q | All | 2 | Event (T) | 169.1 | 4.0 | 8.8 | 0.426 | 0.203 | 0.409 | 0.215 | 0.386 | 0.509 |
| 3Q | All | 2 | Control (C) | 168.3 | 4.0 | 9.3 | 0.380 | 0.204 | 0.336 | 0.207 | 0.387 | 0.487 |
| 3Q | All | 2 | T − C | 0.8 | 0.0 | −0.5 | 0.046 | −0.001 | 0.073 | 0.008 | −0.001 | 0.022 |
| 3Q | All | 2 | (T/C) % | 100 | 101 | 95 | 112 | 100 | 122 | 104 | 100 | 105 |
| 3Q | All | 2 | p-value | 0.94 | 0.66 | 0.11 | 0.03 | 0.96 | 0.00 | 0.37 | 0.94 | 0.24 |
| 3Q | 1 | 2 | Event (T) | 166.4 | 4.6 | 8.3 | 0.326 | 0.147 | 0.394 | 0.157 | 0.298 | 0.452 |
| 3Q | 1 | 2 | Control (C) | 159.0 | 4.4 | 8.7 | 0.292 | 0.152 | 0.328 | 0.151 | 0.299 | 0.432 |
| 3Q | 1 | 2 | T − C | 7.4 | 0.2 | −0.4 | 0.034 | −0.005 | 0.066 | 0.006 | −0.001 | 0.020 |
| 3Q | 1 | 2 | (T/C) % | 105 | 105 | 95 | 112 | 97 | 120 | 104 | 100 | 105 |
| 3Q | 1 | 2 | p-value | 0.59 | 0.14 | 0.05 | 0.01 | 0.45 | 0.00 | 0.45 | 0.90 | 0.18 |
| 3Q | 2 | 2 | Event (T) | 172.3 | 3.4 | 9.4 | 0.503 | 0.252 | 0.408 | 0.256 | 0.471 | 0.562 |
| 3Q | 2 | 2 | Control (C) | 179.5 | 3.6 | 9.2 | 0.434 | 0.233 | 0.342 | 0.234 | 0.442 | 0.507 |
| 3Q | 2 | 2 | T − C | −7.2 | −0.2 | 0.2 | 0.069 | 0.019 | 0.066 | 0.022 | 0.029 | 0.055 |
| 3Q | 2 | 2 | (T/C) | 96 | 94 | 102 | 116 | 108 | 119 | 109 | 107 | 111 |
| 3Q | 2 | 2 | p-value | 0.32 | 0.53 | 1.00 | 0.04 | 0.47 | 0.01 | 0.24 | 0.43 | 0.22 |
| 3R | All | 1 | Event (T) | 154.7 | 4.8 | 9.2 | 0.411 | 0.182 | 0.421 | 0.180 | 0.418 | 0.528 |
| 3R | All | 1 | Control (C) | 159.6 | 4.9 | 9.6 | 0.381 | 0.186 | 0.365 | 0.187 | 0.401 | 0.500 |
| 3R | All | 1 | T − C | −4.9 | −0.1 | −0.4 | 0.030 | −0.004 | 0.056 | −0.007 | 0.017 | 0.028 |
| 3R | All | 1 | (T/C) % | 97 | 98 | 96 | 108 | 98 | 115 | 96 | 104 | 106 |
| 3R | All | 1 | p-value | 0.55 | 0.33 | 0.26 | 0.16 | 0.47 | 0.01 | 0.54 | 0.23 | 0.24 |
| 3R | 1 | 1 | Event (T) | 157.2 | 5.4 | 8.4 | 0.309 | 0.141 | 0.409 | 0.150 | 0.312 | 0.455 |
| 3R | 1 | 1 | Control (C) | 149.7 | 5.4 | 9.2 | 0.309 | 0.147 | 0.373 | 0.153 | 0.311 | 0.443 |
| 3R | 1 | 1 | T − C | 7.5 | 0.0 | −0.8 | 0.000 | −0.006 | 0.036 | −0.003 | 0.001 | 0.012 |
| 3R | 1 | 1 | (T/C) % | 105 | 100 | 91 | 100 | 96 | 110 | 98 | 100 | 103 |
| 3R | 1 | 1 | p-value | 0.60 | 0.75 | 0.06 | 0.99 | 0.52 | 0.17 | 0.74 | 0.86 | 0.48 |
| 3R | 2 | 1 | Event (T) | 164.3 | 4.0 | 9.5 | 0.512 | 0.220 | 0.426 | 0.213 | 0.504 | 0.579 |
| 3R | 2 | 1 | Control (C) | 186.8 | 4.2 | 10.4 | 0.476 | 0.227 | 0.359 | 0.223 | 0.505 | 0.576 |
| 3R | 2 | 1 | T − C | −22.5 | −0.2 | −0.9 | 0.036 | −0.007 | 0.067 | −0.010 | −0.001 | 0.003 |
| 3R | 2 | 1 | (T/C) % | 88 | 95 | 91 | 108 | 97 | 119 | 96 | 100 | 101 |
| 3R | 2 | 1 | p-value | 0.09 | 0.12 | 0.39 | 0.00 | 0.70 | 0.04 | 0.31 | 0.56 | 0.52 |
| 3R | All | 2 | Event (T) | 170.4 | 4.1 | 8.9 | 0.407 | 0.197 | 0.386 | 0.204 | 0.388 | 0.496 |
| 3R | All | 2 | Control (C) | 168.3 | 4.0 | 9.3 | 0.380 | 0.204 | 0.336 | 0.207 | 0.387 | 0.487 |
| 3R | All | 2 | T − C | 2.1 | 0.1 | −0.4 | 0.027 | −0.007 | 0.050 | −0.003 | 0.001 | 0.009 |
| 3R | All | 2 | (T/C) % | 101 | 102 | 95 | 107 | 97 | 115 | 99 | 100 | 102 |
| 3R | All | 2 | p-value | 0.83 | 0.49 | 0.17 | 0.13 | 0.60 | 0.00 | 0.76 | 0.91 | 0.60 |
| 3R | 1 | 2 | Event (T) | 170.3 | 4.6 | 8.8 | 0.329 | 0.154 | 0.376 | 0.152 | 0.315 | 0.454 |
| 3R | 1 | 2 | Control (C) | 159.0 | 4.4 | 8.7 | 0.292 | 0.152 | 0.328 | 0.151 | 0.299 | 0.432 |
| 3R | 1 | 2 | T − C | 11.3 | 0.2 | 0.1 | 0.037 | 0.002 | 0.048 | 0.001 | 0.016 | 0.022 |
| 3R | 1 | 2 | (T/C) % | 107 | 105 | 101 | 113 | 101 | 115 | 101 | 105 | 105 |
| 3R | 1 | 2 | p-value | 0.42 | 0.04 | 0.61 | 0.02 | 0.75 | 0.01 | 0.88 | 0.17 | 0.17 |
| 3R | 2 | 2 | Event (T) | 167.6 | 3.5 | 9.4 | 0.481 | 0.246 | 0.381 | 0.253 | 0.469 | 0.555 |
| 3R | 2 | 2 | Control (C) | 179.5 | 3.6 | 9.2 | 0.434 | 0.233 | 0.342 | 0.234 | 0.442 | 0.507 |
| 3R | 2 | 2 | T − C | −11.9 | −0.1 | 0.2 | 0.047 | 0.013 | 0.039 | 0.019 | 0.027 | 0.048 |
| 3R | 2 | 2 | (T/C) % | 93 | 97 | 102 | 111 | 106 | 111 | 108 | 106 | 109 |
| 3R | 2 | 2 | p-value | 0.42 | 0.82 | 0.83 | 0.50 | 0.89 | 0.00 | 0.72 | 0.77 | 0.63 |
| 3S | All | 1 | Event (T) | 153.1 | 4.1 | 9.6 | 0.426 | 0.212 | 0.400 | 0.227 | 0.397 | 0.527 |
| 3S | All | 1 | Control (C) | 168.3 | 4.0 | 9.3 | 0.380 | 0.204 | 0.336 | 0.207 | 0.387 | 0.487 |
| 3S | All | 1 | T − C | −15.2 | 0.1 | 0.3 | 0.046 | 0.008 | 0.064 | 0.020 | 0.010 | 0.040 |
| 3S | All | 1 | (T/C) % | 91 | 102 | 103 | 112 | 104 | 119 | 110 | 103 | 108 |
| 3S | All | 1 | p-value | 0.02 | 0.95 | 0.46 | 0.00 | 0.06 | 0.00 | 0.34 | 0.10 | 0.03 |
| 3S | 1 | 1 | Event (T) | 139.1 | 5.5 | 8.8 | 0.360 | 0.169 | 0.423 | 0.187 | 0.331 | 0.502 |
| 3S | 1 | 1 | Control (C) | 149.7 | 5.4 | 9.1 | 0.301 | 0.148 | 0.366 | 0.157 | 0.306 | 0.436 |
| 3S | 1 | 1 | T − C | −10.6 | 0.1 | −0.3 | 0.059 | 0.021 | 0.057 | 0.030 | 0.025 | 0.066 |
| 3S | 1 | 1 | (T/C) % | 93 | 102 | 97 | 120 | 114 | 116 | 119 | 108 | 115 |
| 3S | 1 | 1 | p-value | 0.46 | 0.53 | 0.50 | 0.11 | 0.08 | 0.03 | 0.01 | 0.17 | 0.09 |
| 3S | 2 | 1 | Event (T) | 160.4 | 4.2 | 9.9 | 0.525 | 0.233 | 0.422 | 0.215 | 0.515 | 0.599 |
| 3S | 2 | 1 | Control (C) | 186.8 | 4.2 | 10.4 | 0.476 | 0.227 | 0.359 | 0.223 | 0.505 | 0.576 |
| 3S | 2 | 1 | T − C | −26.4 | 0.0 | −0.5 | 0.049 | 0.006 | 0.063 | −0.008 | 0.010 | 0.023 |
| 3S | 2 | 1 | (T/C) % | 86 | 100 | 95 | 110 | 103 | 118 | 96 | 102 | 104 |
| 3S | 2 | 1 | p-value | 0.01 | 0.69 | 0.53 | 0.00 | 0.41 | 0.09 | 0.58 | 0.38 | 0.22 |
| 3S | All | 2 | Event (T) | 137.9 | 4.9 | 9.4 | 0.445 | 0.201 | 0.423 | 0.201 | 0.424 | 0.553 |
| 3S | All | 2 | Control (C) | 159.6 | 4.9 | 9.6 | 0.381 | 0.186 | 0.365 | 0.187 | 0.401 | 0.500 |
| 3S | All | 2 | T − C | −21.7 | 0.0 | −0.2 | 0.064 | 0.015 | 0.058 | 0.014 | 0.023 | 0.053 |
| 3S | All | 2 | (T/C) % | 86 | 100 | 98 | 117 | 108 | 116 | 107 | 106 | 111 |
| 3S | All | 2 | p-value | 0.08 | 0.17 | 0.30 | 0.01 | 0.35 | 0.00 | 0.04 | 0.43 | 0.03 |
| 3S | 1 | 2 | Event (T) | 153.3 | 4.7 | 9.2 | 0.376 | 0.180 | 0.422 | 0.184 | 0.330 | 0.506 |
| 3S | 1 | 2 | Control (C) | 159.0 | 4.4 | 8.7 | 0.292 | 0.152 | 0.328 | 0.151 | 0.299 | 0.432 |
| 3S | 1 | 2 | T − C | −5.7 | 0.3 | 0.5 | 0.084 | 0.028 | 0.094 | 0.033 | 0.031 | 0.074 |
| 3S | 1 | 2 | (T/C) % | 96 | 107 | 106 | 129 | 118 | 129 | 122 | 110 | 117 |
| 3S | 1 | 2 | p-value | 0.71 | 0.02 | 0.26 | 0.00 | 0.04 | 0.00 | 0.02 | 0.08 | 0.03 |
| 3S | 2 | 2 | Event (T) | 155.6 | 3.5 | 9.7 | 0.459 | 0.239 | 0.367 | 0.240 | 0.450 | 0.538 |
| 3S | 2 | 2 | Control (C) | 179.5 | 3.6 | 9.2 | 0.434 | 0.233 | 0.342 | 0.234 | 0.442 | 0.507 |
| 3S | 2 | 2 | T − C | −23.9 | −0.1 | 0.5 | 0.025 | 0.006 | 0.025 | 0.006 | 0.008 | 0.031 |
| 3S | 2 | 2 | (T/C) % | 87 | 97 | 105 | 106 | 103 | 107 | 103 | 102 | 106 |
| 3S | 2 | 2 | p-value | 0.03 | 0.95 | 0.61 | 0.57 | 0.84 | 0.19 | 0.39 | 0.71 | 0.55 |
| 3T | All | 1 | Event (T) | 155.8 | 4.5 | 9.6 | 0.448 | 0.206 | 0.398 | 0.211 | 0.449 | 0.541 |
| 3T | All | 1 | Control (C) | 159.6 | 4.8 | 9.7 | 0.389 | 0.188 | 0.363 | 0.190 | 0.405 | 0.506 |
| 3T | All | 1 | T − C | −3.8 | −0.3 | −0.1 | 0.059 | 0.018 | 0.035 | 0.021 | 0.044 | 0.035 |
| 3T | All | 1 | (T/C) % | 98 | 94 | 99 | 115 | 110 | 110 | 111 | 111 | 107 |
| 3T | All | 1 | p-value | 0.95 | 1.00 | 0.22 | 0.23 | 0.60 | 0.05 | 0.40 | 0.79 | 0.59 |
| 3T | 1 | 1 | Event (T) | 158.9 | 5.3 | 8.7 | 0.316 | 0.145 | 0.429 | 0.151 | 0.316 | 0.453 |
| 3T | 1 | 1 | Control (C) | 149.7 | 5.4 | 9.0 | 0.304 | 0.143 | 0.364 | 0.152 | 0.306 | 0.433 |
| 3T | 1 | 1 | T − C | 9.2 | −0.1 | −0.3 | 0.012 | 0.002 | 0.065 | −0.001 | 0.010 | 0.020 |
| 3T | 1 | 1 | (T/C) % | 106 | 98 | 97 | 104 | 101 | 118 | 99 | 103 | 105 |
| 3T | 1 | 1 | p-value | 0.52 | 0.67 | 0.27 | 0.49 | 0.82 | 0.06 | 0.88 | 0.30 | 0.15 |
| 3T | 2 | 1 | Event (T) | 167.1 | 4.2 | 10.0 | 0.498 | 0.229 | 0.386 | 0.234 | 0.499 | 0.574 |
| 3T | 2 | 1 | Control (C) | 186.8 | 4.2 | 10.4 | 0.476 | 0.227 | 0.359 | 0.223 | 0.505 | 0.576 |
| 3T | 2 | 1 | T − C | −19.7 | 0.0 | −0.4 | 0.022 | 0.002 | 0.027 | 0.011 | −0.006 | −0.002 |
| 3T | 2 | 1 | (T/C) % | 89 | 100 | 96 | 105 | 101 | 108 | 105 | 99 | 100 |
| 3T | 2 | 1 | p-value | 0.02 | 0.60 | 0.54 | 0.51 | 0.79 | 0.14 | 0.60 | 0.94 | 0.76 |
| 3T | All | 2 | Event (T) | 157.4 | 4.2 | 8.9 | 0.398 | 0.201 | 0.389 | 0.198 | 0.386 | 0.492 |
| 3T | All | 2 | Control (C) | 168.3 | 4.0 | 9.3 | 0.380 | 0.204 | 0.336 | 0.207 | 0.387 | 0.487 |
| 3T | All | 2 | T − C | −10.9 | 0.2 | −0.5 | 0.018 | −0.003 | 0.053 | −0.009 | −0.001 | 0.005 |
| 3T | All | 2 | (T/C) % | 94 | 105 | 95 | 105 | 99 | 116 | 96 | 100 | 101 |
| 3T | All | 2 | p-value | 0.18 | 0.12 | 0.04 | 0.25 | 0.81 | 0.00 | 0.26 | 0.88 | 0.72 |
| 3T | 1 | 2 | Event (T) | 152.2 | 4.7 | 8.3 | 0.311 | 0.146 | 0.379 | 0.145 | 0.302 | 0.440 |
| 3T | 1 | 2 | Control (C) | 159.0 | 4.4 | 8.7 | 0.292 | 0.152 | 0.328 | 0.151 | 0.299 | 0.432 |
| 3T | 1 | 2 | T − C | −6.8 | 0.3 | −0.4 | 0.019 | −0.006 | 0.051 | −0.006 | 0.003 | 0.008 |
| 3T | 1 | 2 | (T/C) % | 96 | 107 | 95 | 107 | 96 | 116 | 96 | 101 | 102 |
| 3T | 1 | 2 | p-value | 0.62 | 0.03 | 0.04 | 0.22 | 0.37 | 0.01 | 0.55 | 0.72 | 0.62 |
| 3T | 2 | 2 | Event (T) | 168.7 | 3.5 | 9.5 | 0.492 | 0.258 | 0.388 | 0.257 | 0.470 | 0.558 |
| 3T | 2 | 2 | Control (C) | 179.5 | 3.6 | 9.2 | 0.434 | 0.233 | 0.342 | 0.234 | 0.442 | 0.507 |
| 3T | 2 | 2 | T − C | −10.8 | −0.1 | 0.3 | 0.058 | 0.025 | 0.046 | 0.023 | 0.028 | 0.051 |
| 3T | 2 | 2 | (T/C) % | 94 | 97 | 103 | 113 | 111 | 113 | 110 | 106 | 110 |
| 3T | 2 | 2 | p-value | 0.07 | 0.94 | 0.81 | 0.21 | 0.38 | 0.02 | 0.50 | 0.47 | 0.34 |

TABLE 31
Summary of field data for Construct 4. Numbers shown in bold are significantly different from the control at the
p-value shown. bu/a is bushels per acre. “All” indicates the average across all events or testers. (T/C) % is
the value for the transgenic hybrid combination (T) expressed as a percent of the control (C).

| | | Yield | Oil | Protein | Arg | Cys | Lys | Met | Thr | Val |
|---|---|---|---|---|---|---|---|---|---|---|
| | | (bu/a) | (%) | (%) | (%) | (%) | (%) | (%) | (%) | (%) |
| Event | Description | p < 0.1 | p < 0.05 | p < 0.05 | p < 0.05 | p < 0.05 | p < 0.05 | p < 0.05 | p < 0.05 | p < 0.05 |
| All | (T/C) % | 101 | 102 | 102 | 103 | 102 | 101 | 98 | 101 | 102 |
| 4V | (T/C) % | 103 | 102 | 101 | 101 | 99 | 100 | 96 | 100 | 101 |
| 4W | (T/C) % | 100 | 102 | 103 | 105 | 104 | 102 | 100 | 102 | 104 |

TABLE 32
Field data for Construct 4. Numbers shown in bold are significantly different from the control at the p-value shown.
bu/a is bushels per acre. “All” indicates the average across all events or testers. (T/C) % is the value for the
transgenic hybrid combination expressed as a percent of the control. T − C is the transgenic hybrid combination
minus the control. Oil, protein, and amino acid content are shown as percent of seed dry weight.

| | | Yield | Oil | Protein | Arg | Cys | Lys | Met | Thr | Val |
|---|---|---|---|---|---|---|---|---|---|---|
| | | (bu/a) | (%) | (%) | (%) | (%) | (%) | (%) | (%) | (%) |
| Event | Description | p < 0.1 | p < 0.05 | p < 0.05 | p < 0.05 | p < 0.05 | p < 0.05 | p < 0.05 | p < 0.05 | p < 0.05 |
| All | Construct (T) | 160.1 | 5.3 | 9.7 | 0.323 | 0.166 | 0.333 | 0.172 | 0.319 | 0.473 |
| All | Control (C) | 157.8 | 5.2 | 9.6 | 0.314 | 0.163 | 0.331 | 0.176 | 0.315 | 0.462 |
| All | T − C | 2.3 | 0.1 | 0.2 | 0.009 | 0.003 | 0.002 | −0.004 | 0.004 | 0.011 |
| All | (T/C) % | 101 | 102 | 102 | 103 | 102 | 101 | 98 | 101 | 102 |
| All | p-value | 0.51 | 0.34 | 0.44 | 0.32 | 0.66 | 0.81 | 0.46 | 0.57 | 0.29 |
| 4V | Event (T) | 162.2 | 5.2 | 9.6 | 0.317 | 0.162 | 0.330 | 0.168 | 0.315 | 0.466 |
| 4V | Control (C) | 157.9 | 5.2 | 9.6 | 0.314 | 0.163 | 0.331 | 0.176 | 0.315 | 0.462 |
| 4V | T − C | 4.4 | 0.1 | 0.1 | 0.003 | −0.002 | −0.001 | −0.008 | 0.000 | 0.004 |
| 4V | (T/C) % | 103 | 102 | 101 | 101 | 99 | 100 | 96 | 100 | 101 |
| 4V | p-value | 0.30 | 0.48 | 0.79 | 0.76 | 0.81 | 0.92 | 0.20 | 0.96 | 0.71 |
| 4W | Event (T) | 158.1 | 5.3 | 9.8 | 0.329 | 0.171 | 0.337 | 0.177 | 0.322 | 0.480 |
| 4W | Control (C) | 157.8 | 5.2 | 9.6 | 0.314 | 0.163 | 0.331 | 0.176 | 0.315 | 0.462 |
| 4W | T − C | 0.3 | 0.1 | 0.3 | 0.015 | 0.007 | 0.005 | 0.000 | 0.007 | 0.018 |
| 4W | (T/C) % | 100 | 102 | 103 | 105 | 104 | 102 | 100 | 102 | 104 |
| 4W | p-value | 0.95 | 0.35 | 0.32 | 0.15 | 0.34 | 0.59 | 0.98 | 0.36 | 0.15 |

TABLE 33
Summary of field data for Construct 4 by year. Numbers shown in bold are significantly different from the control at
the p-value shown. bu/a is bushels per acre. “All” indicates the average across both years. (T/C) % is the value
for the transgenic hybrid combination (T) expressed as a percent of the control (C).

| | | Yield | Oil | Protein | Arg | Cys | Lys | Met | Thr | Val |
|---|---|---|---|---|---|---|---|---|---|---|
| | | (bu/a) | (%) | (%) | (%) | (%) | (%) | (%) | (%) | (%) |
| Year | Description | p < 0.1 | p < 0.05 | p < 0.05 | p < 0.05 | p < 0.05 | p < 0.05 | p < 0.05 | p < 0.05 | p < 0.05 |
| All | (T/C) % | 98 | 104 | 104 | 104 | 113 | 101 | 106 | 105 | 105 |
| 2 | (T/C) % | 98 | 103 | 97 | 101 | 102 | 100 | 99 | 100 | 102 |
| 1 | (T/C) % | 102 | 102 | 108 | 105 | 115 | 101 | 106 | 106 | 106 |

TABLE 34
Summary of field data for Construct 5 for Year 1. Numbers shown in bold are significantly different from the control
at the p-value shown. bu/a is bushels per acre. “All” indicates the average across all events or testers. (T/C) %
is the value for the transgenic hybrid combination (T) expressed as a percent of the control (C).

| | | Yield | Oil | Prot | Arg | Cys | Lys | Met | Thr | Val |
|---|---|---|---|---|---|---|---|---|---|---|
| | | (bu/a) | (%) | (%) | (%) | (%) | (%) | (%) | (%) | (%) |
| Event | Description | p <= 0.10 | p <= 0.15 | p <= 0.15 | p <= 0.15 | p <= 0.15 | p <= 0.15 | p <= 0.15 | p <= 0.15 | p <= 0.15 |
| All | (T/C) % | 93 | 102 | 112 | 113 | 108 | 111 | 109 | 106 | 109 |
| 5X | (T/C) % | 94 | 106 | 112 | 117 | 113 | 112 | 115 | 108 | 111 |
| 5Y | (T/C) % | 98 | 109 | 112 | 119 | 111 | 120 | 112 | 108 | 112 |
| 5Z | (T/C) % | 98 | 109 | 112 | 119 | 111 | 120 | 112 | 108 | 112 |
| 5A1 | (T/C) % | 94 | 104 | 112 | 110 | 103 | 112 | 102 | 107 | 108 |
| 5B1 | (T/C) % | 83 | 106 | 111 | 115 | 113 | 112 | 110 | 107 | 110 |
| 5C1 | (T/C) % | 102 | 106 | 115 | 117 | 124 | 106 | 118 | 110 | 112 |

TABLE 35
Field data for Construct 5 for Year 1. Numbers shown in bold are significantly different from the control at
the p-value shown. bu/a is bushels per acre. “All” indicates the average across all events or testers.
(T/C) % is the value for the transgenic hybrid combination (T) expressed as a percent of the control (C). T − C
is the transgenic hybrid combination minus the control. Oil, protein, and amino acid content are shown as percent of
seed dry weight.

| | | Yield | Oil | Prot | Arg | Cys | Lys | Met | Thr | Val |
|---|---|---|---|---|---|---|---|---|---|---|
| | | (bu/a) | (%) | (%) | (%) | (%) | (%) | (%) | (%) | (%) |
| Event | Description | p <= 0.10 | p <= 0.15 | p <= 0.15 | p <= 0.15 | p <= 0.15 | p <= 0.15 | p <= 0.15 | p <= 0.15 | p <= 0.15 |
| All | Construct (T) | 134.9 | 5.0 | 9.9 | 0.335 | 0.171 | 0.355 | 0.182 | 0.309 | 0.476 |
| All | Control (C) | 144.8 | 4.9 | 8.8 | 0.297 | 0.158 | 0.321 | 0.167 | 0.292 | 0.435 |
| All | T − C | −9.9 | 0.1 | 1.1 | 0.038 | 0.013 | 0.034 | 0.015 | 0.017 | 0.041 |
| All | (T/C) % | 93 | 102 | 112 | 113 | 108 | 111 | 109 | 106 | 109 |
| All | p-value | 0.09 | 0.39 | 0.00 | 0.00 | 0.06 | 0.00 | 0.01 | 0.01 | 0.00 |
| 5X | Event (T) | 136.4 | 5.0 | 9.9 | 0.342 | 0.171 | 0.359 | 0.187 | 0.309 | 0.481 |
| 5X | Control (C) | 144.8 | 4.7 | 8.8 | 0.293 | 0.151 | 0.320 | 0.163 | 0.286 | 0.432 |
| 5X | T − C | −8.4 | 0.3 | 1.1 | 0.049 | 0.020 | 0.039 | 0.024 | 0.023 | 0.049 |
| 5X | (T/C) % | 94 | 106 | 112 | 117 | 113 | 112 | 115 | 108 | 111 |
| 5X | p-value | 0.32 | 0.23 | 0.00 | 0.00 | 0.02 | 0.06 | 0.01 | 0.01 | 0.00 |
| 5Y | Event (T) | 141.8 | 5.1 | 9.9 | 0.347 | 0.168 | 0.383 | 0.182 | 0.311 | 0.483 |
| 5Y | Control (C) | 144.8 | 4.7 | 8.8 | 0.292 | 0.151 | 0.318 | 0.163 | 0.287 | 0.433 |
| 5Y | T − C | −3.0 | 0.4 | 1.1 | 0.055 | 0.017 | 0.065 | 0.019 | 0.024 | 0.050 |
| 5Y | (T/C) % | 98 | 109 | 112 | 119 | 111 | 120 | 112 | 108 | 112 |
| 5Y | p-value | 0.73 | 0.13 | 0.00 | 0.00 | 0.04 | 0.00 | 0.01 | 0.01 | 0.00 |
| 5Z | Event (T) | 141.8 | 5.1 | 9.9 | 0.347 | 0.168 | 0.383 | 0.182 | 0.311 | 0.483 |
| 5Z | Control (C) | 144.8 | 4.7 | 8.8 | 0.292 | 0.151 | 0.318 | 0.163 | 0.287 | 0.433 |
| 5Z | T − C | −3.0 | 0.4 | 1.1 | 0.055 | 0.017 | 0.065 | 0.019 | 0.024 | 0.050 |
| 5Z | (T/C) % | 98 | 109 | 112 | 119 | 111 | 120 | 112 | 108 | 112 |
| 5Z | p-value | 0.73 | 0.13 | 0.00 | 0.00 | 0.04 | 0.00 | 0.01 | 0.01 | 0.00 |
| 5A1 | Event (T) | 135.4 | 4.9 | 9.9 | 0.321 | 0.155 | 0.358 | 0.166 | 0.305 | 0.466 |
| 5A1 | Control (C) | 144.8 | 4.7 | 8.8 | 0.293 | 0.151 | 0.320 | 0.163 | 0.286 | 0.432 |
| 5A1 | T − C | −9.4 | 0.2 | 1.1 | 0.028 | 0.004 | 0.038 | 0.003 | 0.019 | 0.034 |
| 5A1 | (T/C) % | 94 | 104 | 112 | 110 | 103 | 112 | 102 | 107 | 108 |
| 5A1 | p-value | 0.27 | 0.42 | 0.00 | 0.04 | 0.70 | 0.04 | 0.72 | 0.04 | 0.03 |
| 5B1 | Event (T) | 120.4 | 5.2 | 9.8 | 0.343 | 0.179 | 0.359 | 0.183 | 0.312 | 0.477 |
| 5B1 | Control (C) | 144.8 | 4.9 | 8.8 | 0.297 | 0.158 | 0.321 | 0.167 | 0.292 | 0.435 |
| 5B1 | T − C | −24.4 | 0.3 | 1.0 | 0.046 | 0.021 | 0.038 | 0.016 | 0.020 | 0.042 |
| 5B1 | (T/C) % | 83 | 106 | 111 | 115 | 113 | 112 | 110 | 107 | 110 |
| 5B1 | p-value | 0.01 | 0.18 | 0.00 | 0.00 | 0.03 | 0.02 | 0.02 | 0.03 | 0.00 |
| 5C1 | Event (T) | 147.1 | 5.0 | 10.1 | 0.341 | 0.187 | 0.336 | 0.192 | 0.317 | 0.487 |
| 5C1 | Control (C) | 144.8 | 4.7 | 8.8 | 0.292 | 0.151 | 0.318 | 0.163 | 0.287 | 0.433 |
| 5C1 | T − C | 2.3 | 0.3 | 1.3 | 0.049 | 0.036 | 0.018 | 0.029 | 0.030 | 0.054 |
| 5C1 | (T/C) % | 102 | 106 | 115 | 117 | 124 | 106 | 118 | 110 | 112 |
| 5C1 | p-value | 0.80 | 0.19 | 0.00 | 0.00 | 0.00 | 0.28 | 0.00 | 0.00 | 0.00 |

TABLE 36
Summary of field data for Construct 5 for Year 2. Numbers shown in bold are significantly different from
the control at the p-value shown. bu/a is bushels per acre. The events are an average over four testers. “All”
indicates the average across all events or testers. (T/C)% is the value for the transgenic hybrid combination (T)
expressed as a percent of the control (C).

| | | Yield | Oil | Prot | Arg | Cys | Ile | Lys | Met | Thr | Val |
|---|---|---|---|---|---|---|---|---|---|---|---|
| | Descrip- | (bu/a) | (%) | (%) | (%) | (%) | (%) | (%) | (%) | (%) | (%) |
| Event | tion | p <= 0.10 | p <= 0.15 | p <= 0.15 | p <= 0.15 | p <= 0.15 | P <= 0.05 | p <= 0.15 | p <= 0.15 | p <= 0.15 | p <= 0.15 |
| All | (T/C) % | 92 | 103 | 113 | 116 | 110 | 106 | 114 | 109 | 108 | 111 |
| 5X | (T/C) % | 90 | 103 | 117 | 121 | 111 | 109 | 116 | 112 | 110 | 114 |
| 5Y | (T/C) % | 90 | 103 | 112 | 116 | 108 | 106 | 115 | 109 | 109 | 111 |
| 5Z | (T/C) % | 94 | 105 | 111 | 112 | 105 | 104 | 114 | 105 | 106 | 109 |
| 5A1 | (T/C) % | 88 | 108 | 112 | 119 | 113 | 106 | 117 | 111 | 108 | 111 |
| 5B1 | (T/C) % | 94 | 100 | 110 | 113 | 108 | 106 | 110 | 108 | 107 | 110 |
| 5C1 | (T/C) % | 97 | 103 | 112 | 117 | 113 | 107 | 113 | 112 | 109 | 112 |

TABLE 37
Field data for Construct 5 for Year 2. Numbers shown in bold are significantly different from the control at
the p-value shown. bu/a is bushels per acre. The events are an average over four testers. “All” indicates
the average across all events or testers. (T/C) % is the value for the transgenic hybrid combination (T) expressed
as a percent of the control (C). T − C is the transgenic hybrid combination minus the control. Oil, protein,
and amino acid content are shown as percent of seed dry weight.

| | | Yield | Oil | Prot | Arg | Cys | Ile | Lys | Met | Thr | Val |
|---|---|---|---|---|---|---|---|---|---|---|---|
| | | (bu/a) | (%) | (%) | (%) | (%) | (%) | (%) | (%) | (%) | (%) |
| Event | Description | p <= 0.10 | p <= 0.15 | p <= 0.15 | p <= 0.15 | p <= 0.15 | P <= 0.05 | p <= 0.15 | p <= 0.15 | p <= 0.15 | p <= 0.15 |
| All | Construct (T) | 160.4 | 4.0 | 11.3 | 0.541 | 0.251 | 0.396 | 0.407 | 0.256 | 0.515 | 0.604 |
| All | Control (C) | 174.3 | 3.9 | 10.0 | 0.465 | 0.229 | 0.372 | 0.356 | 0.234 | 0.476 | 0.543 |
| All | T − C | −13.9 | 0.1 | 1.3 | 0.076 | 0.022 | 0.024 | 0.051 | 0.022 | 0.039 | 0.061 |
| All | (T/C) % | 92 | 103 | 113 | 116 | 110 | 106 | 114 | 109 | 108 | 111 |
| All | p-value | 0.00 | 0.14 | 0.01 | 0.01 | 0.12 | 0.06 | 0.00 | 0.06 | 0.02 | 0.01 |
| 5X | Event (T) | 156.4 | 4.0 | 11.7 | 0.563 | 0.255 | 0.405 | 0.413 | 0.262 | 0.523 | 0.620 |
| 5X | Control (C) | 174.3 | 3.9 | 10.0 | 0.465 | 0.229 | 0.372 | 0.356 | 0.234 | 0.476 | 0.543 |
| 5X | T − C | −17.9 | 0.1 | 1.7 | 0.098 | 0.026 | 0.033 | 0.057 | 0.028 | 0.047 | 0.077 |
| 5X | (T/C) % | 90 | 103 | 117 | 121 | 111 | 109 | 116 | 112 | 110 | 114 |
| 5X | p-value | 0.04 | 0.51 | 0.01 | 0.04 | 0.14 | 0.18 | 0.01 | 0.08 | 0.07 | 0.05 |
| 5Y | Event (T) | 156.5 | 4.0 | 11.2 | 0.538 | 0.247 | 0.395 | 0.411 | 0.254 | 0.517 | 0.605 |
| 5Y | Control (C) | 174.3 | 3.9 | 10.0 | 0.465 | 0.229 | 0.372 | 0.356 | 0.234 | 0.476 | 0.543 |
| 5Y | T − C | −17.8 | 0.1 | 1.2 | 0.073 | 0.018 | 0.023 | 0.055 | 0.020 | 0.041 | 0.062 |
| 5Y | (T/C) % | 90 | 103 | 112 | 116 | 108 | 106 | 115 | 109 | 109 | 111 |
| 5Y | p-value | 0.01 | 0.40 | 0.00 | 0.02 | 0.15 | 0.05 | 0.00 | 0.07 | 0.01 | 0.01 |
| 5Z | Event (T) | 163.9 | 4.1 | 11.1 | 0.523 | 0.241 | 0.386 | 0.405 | 0.246 | 0.504 | 0.590 |
| 5Z | Control (C) | 174.3 | 3.9 | 10.0 | 0.465 | 0.229 | 0.372 | 0.356 | 0.234 | 0.476 | 0.543 |
| 5Z | T − C | −10.4 | 0.2 | 1.1 | 0.058 | 0.012 | 0.014 | 0.049 | 0.012 | 0.028 | 0.047 |
| 5Z | (T/C) % | 94 | 105 | 111 | 112 | 105 | 104 | 114 | 105 | 106 | 109 |
| 5Z | p-value | 0.02 | 0.00 | 0.01 | 0.00 | 0.20 | 0.09 | 0.01 | 0.14 | 0.00 | 0.00 |
| 5A1 | Event (T) | 154.2 | 4.2 | 11.2 | 0.552 | 0.258 | 0.393 | 0.416 | 0.260 | 0.515 | 0.605 |
| 5A1 | Control (C) | 174.3 | 3.9 | 10.0 | 0.465 | 0.229 | 0.372 | 0.356 | 0.234 | 0.476 | 0.543 |
| 5A1 | T − C | −20.1 | 0.3 | 1.2 | 0.087 | 0.029 | 0.021 | 0.060 | 0.026 | 0.039 | 0.062 |
| 5A1 | (T/C) % | 88 | 108 | 112 | 119 | 113 | 106 | 117 | 111 | 108 | 111 |
| 5A1 | p-value | 0.01 | 0.05 | 0.05 | 0.01 | 0.04 | 0.16 | 0.01 | 0.02 | 0.04 | 0.03 |
| 5B1 | Event (T) | 163.2 | 4.0 | 11.1 | 0.529 | 0.247 | 0.398 | 0.392 | 0.253 | 0.514 | 0.600 |
| 5B1 | Control (C) | 174.3 | 4.0 | 10.1 | 0.468 | 0.229 | 0.374 | 0.357 | 0.235 | 0.479 | 0.546 |
| 5B1 | T − C | −11.2 | 0.0 | 1.0 | 0.061 | 0.018 | 0.024 | 0.035 | 0.018 | 0.035 | 0.054 |
| 5B1 | (T/C) % | 94 | 100 | 110 | 113 | 108 | 106 | 110 | 108 | 107 | 110 |
| 5B1 | p-value | 0.05 | 0.97 | 0.02 | 0.01 | 0.10 | 0.09 | 0.00 | 0.12 | 0.03 | 0.02 |
| 5C1 | Event (T) | 168.9 | 4.0 | 11.2 | 0.544 | 0.259 | 0.399 | 0.402 | 0.261 | 0.519 | 0.606 |
| 5C1 | Control (C) | 174.3 | 3.9 | 10.0 | 0.465 | 0.229 | 0.372 | 0.356 | 0.234 | 0.476 | 0.543 |
| 5C1 | T − C | −5.4 | 0.1 | 1.2 | 0.079 | 0.030 | 0.027 | 0.046 | 0.027 | 0.043 | 0.063 |
| 5C1 | (T/C) % | 97 | 103 | 112 | 117 | 113 | 107 | 113 | 112 | 109 | 112 |
| 5C1 | p-value | 0.23 | 0.40 | 0.00 | 0.01 | 0.13 | 0.06 | 0.02 | 0.09 | 0.00 | 0.00 |

TABLE 38
Field data for Construct 5 by Year by Tester. Numbers shown in bold are significantly different from the control
at the p-value shown. bu/a is bushels per acre. “All” indicates the average across all events or years. (T/C) %
is the value for the transgenic hybrid combination (T) expressed as a percent of the control (C). T − C is the
transgenic hybrid combination minus the control. Oil, protein, and amino acid content are shown as percent of seed
dry weight.

| | | | | Yield | Oil | Prot | Arg | Cys | Lys | Met | Thr | Val |
|---|---|---|---|---|---|---|---|---|---|---|---|---|
| | | | | (bu/a) | (%) | (%) | (%) | (%) | (%) | (%) | (%) | (%) |
| Event | Year | Tester | Description | p <= 0.10 | p <= 0.15 | p <= 0.15 | p <= 0.15 | p <= 0.15 | p <= 0.15 | p <= 0.15 | p <= 0.15 | p <= 0.15 |
| All | All | 1 | Construct (T) | 136.8 | 5.0 | 10.4 | 0.431 | 0.214 | 0.382 | 0.222 | 0.416 | 0.531 |
| All | All | 1 | Control (C) | 149.0 | 4.7 | 9.1 | 0.376 | 0.191 | 0.350 | 0.203 | 0.388 | 0.482 |
| All | All | 1 | T − C | −12.2 | 0.3 | 1.3 | 0.055 | 0.023 | 0.032 | 0.019 | 0.028 | 0.049 |
| All | All | 1 | (T/C) % | 92 | 106 | 114 | 115 | 112 | 109 | 109 | 107 | 110 |
| All | All | 1 | p-value | 0.16 | 0.00 | 0.00 | 0.00 | 0.00 | 0.00 | 0.00 | 0.00 | 0.00 |
| All | 1 | 1 | Construct (T) | 128.3 | 5.7 | 9.7 | 0.333 | 0.169 | 0.357 | 0.189 | 0.313 | 0.472 |
| All | 1 | 1 | Control (C) | 137.1 | 5.4 | 8.8 | 0.305 | 0.164 | 0.325 | 0.169 | 0.299 | 0.439 |
| All | 1 | 1 | T − C | −8.8 | 0.3 | 0.9 | 0.028 | 0.005 | 0.032 | 0.020 | 0.014 | 0.033 |
| All | 1 | 1 | (T/C) % | 94 | 106 | 110 | 109 | 103 | 110 | 112 | 105 | 108 |
| All | 1 | 1 | p-value | 0.02 | 0.04 | 0.01 | 0.02 | 0.58 | 0.15 | 0.00 | 0.12 | 0.02 |
| All | 2 | 1 | Construct (T) | 157.6 | 4.2 | 11.2 | 0.536 | 0.257 | 0.398 | 0.263 | 0.526 | 0.604 |
| All | 2 | 1 | Control (C) | 171.5 | 4.0 | 9.9 | 0.475 | 0.233 | 0.362 | 0.243 | 0.493 | 0.552 |
| All | 2 | 1 | T − C | −13.9 | 0.2 | 1.3 | 0.061 | 0.024 | 0.036 | 0.020 | 0.033 | 0.052 |
| All | 2 | 1 | (T/C) % | 92 | 105 | 113 | 113 | 110 | 110 | 108 | 107 | 109 |
| All | 2 | 1 | p-value | 0.00 | 0.00 | 0.00 | 0.00 | 0.01 | 0.01 | 0.01 | 0.00 | 0.00 |
| All | All | 2 | Construct (T) | 152.3 | 4.0 | 10.3 | 0.419 | 0.211 | 0.365 | 0.217 | 0.394 | 0.527 |
| All | All | 2 | Control (C) | 163.5 | 3.9 | 9.1 | 0.353 | 0.190 | 0.318 | 0.196 | 0.359 | 0.467 |
| All | All | 2 | T − C | −11.2 | 0.1 | 1.2 | 0.066 | 0.021 | 0.047 | 0.021 | 0.035 | 0.060 |
| All | All | 2 | (T/C) % | 93 | 103 | 113 | 119 | 111 | 115 | 111 | 110 | 113 |
| All | All | 2 | p-value | 0.01 | 0.08 | 0.00 | 0.00 | 0.00 | 0.00 | 0.00 | 0.00 | 0.00 |
| All | 1 | 2 | Construct (T) | 141.9 | 4.7 | 10.0 | 0.336 | 0.172 | 0.345 | 0.182 | 0.312 | 0.484 |
| All | 1 | 2 | Control (C) | 152.6 | 4.4 | 8.8 | 0.290 | 0.152 | 0.303 | 0.163 | 0.289 | 0.436 |
| All | 1 | 2 | T − C | −10.7 | 0.3 | 1.2 | 0.046 | 0.020 | 0.042 | 0.019 | 0.023 | 0.048 |
| All | 1 | 2 | (T/C) % | 93 | 107 | 114 | 116 | 113 | 114 | 112 | 108 | 111 |
| All | 1 | 2 | p-value | 0.01 | 0.02 | 0.00 | 0.00 | 0.05 | 0.00 | 0.02 | 0.01 | 0.00 |
| All | 2 | 2 | Construct (T) | 161.7 | 3.4 | 10.8 | 0.506 | 0.253 | 0.388 | 0.254 | 0.481 | 0.576 |
| All | 2 | 2 | Control (C) | 172.6 | 3.4 | 9.5 | 0.422 | 0.229 | 0.335 | 0.228 | 0.434 | 0.504 |
| All | 2 | 2 | T − C | −10.9 | 0.0 | 1.3 | 0.084 | 0.024 | 0.053 | 0.026 | 0.047 | 0.072 |
| All | 2 | 2 | (T/C) % | 94 | 100 | 114 | 120 | 110 | 116 | 111 | 111 | 114 |
| All | 2 | 2 | p-value | 0.10 | 0.55 | 0.02 | 0.02 | 0.00 | 0.00 | 0.04 | 0.01 | 0.03 |
| 5X | All | 1 | Event (T) | 137.3 | 4.8 | 10.6 | 0.463 | 0.218 | 0.395 | 0.233 | 0.450 | 0.543 |
| 5X | All | 1 | Control (C) | 151.6 | 4.7 | 9.3 | 0.391 | 0.198 | 0.353 | 0.208 | 0.398 | 0.494 |
| 5X | All | 1 | T − C | −14.3 | 0.1 | 1.3 | 0.072 | 0.020 | 0.042 | 0.025 | 0.052 | 0.049 |
| 5X | All | 1 | (T/C) % | 91 | 102 | 114 | 118 | 110 | 112 | 112 | 113 | 110 |
| 5X | All | 1 | p-value | 0.11 | 0.00 | 0.00 | 0.09 | 0.51 | 0.05 | 0.16 | 0.40 | 0.18 |
| 5X | 1 | 1 | Event (T) | 127.1 | 6.3 | 9.0 | 0.315 | 0.156 | 0.382 | 0.176 | 0.281 | 0.435 |
| 5X | 1 | 1 | Control (C) | 137.1 | 5.4 | 8.6 | 0.300 | 0.146 | 0.362 | 0.162 | 0.278 | 0.423 |
| 5X | 1 | 1 | T − C | −10.0 | 0.9 | 0.4 | 0.015 | 0.010 | 0.020 | 0.014 | 0.003 | 0.012 |
| 5X | 1 | 1 | (T/C) % | 93 | 117 | 105 | 105 | 107 | 106 | 109 | 101 | 103 |
| 5X | 1 | 1 | p-value | 0.51 | 0.00 | 0.44 | 0.64 | 0.33 | 0.61 | 0.05 | 0.84 | 0.62 |
| 5X | 2 | 1 | Event (T) | 152.8 | 4.2 | 11.2 | 0.512 | 0.238 | 0.399 | 0.252 | 0.506 | 0.578 |
| 5X | 2 | 1 | Control (C) | 175.0 | 4.0 | 9.8 | 0.470 | 0.231 | 0.362 | 0.242 | 0.492 | 0.548 |
| 5X | 2 | 1 | T − C | −22.2 | 0.2 | 1.4 | 0.042 | 0.007 | 0.037 | 0.010 | 0.014 | 0.030 |
| 5X | 2 | 1 | (T/C) % | 87 | 105 | 114 | 109 | 103 | 110 | 104 | 103 | 105 |
| 5X | 2 | 1 | p-value | 0.00 | 0.04 | 0.05 | 0.22 | 0.61 | 0.04 | 0.32 | 0.50 | 0.27 |
| 5X | All | 2 | Event (T) | 151.2 | 4.0 | 10.4 | 0.427 | 0.212 | 0.373 | 0.219 | 0.396 | 0.529 |
| 5X | All | 2 | Control (C) | 165.8 | 3.9 | 9.1 | 0.355 | 0.191 | 0.319 | 0.196 | 0.359 | 0.468 |
| 5X | All | 2 | T − C | −14.6 | 0.1 | 1.3 | 0.072 | 0.021 | 0.054 | 0.023 | 0.037 | 0.061 |
| 5X | All | 2 | (T/C) % | 91 | 102 | 114 | 120 | 111 | 117 | 112 | 110 | 113 |
| 5X | All | 2 | p-value | 0.07 | 0.30 | 0.00 | 0.00 | 0.02 | 0.00 | 0.00 | 0.00 | 0.00 |
| 5X | 1 | 2 | Event (T) | 145.7 | 4.7 | 10.2 | 0.349 | 0.175 | 0.353 | 0.190 | 0.316 | 0.492 |
| 5X | 1 | 2 | Control (C) | 152.6 | 4.4 | 8.8 | 0.290 | 0.152 | 0.303 | 0.163 | 0.289 | 0.436 |
| 5X | 1 | 2 | T − C | −6.9 | 0.3 | 1.4 | 0.059 | 0.023 | 0.050 | 0.027 | 0.027 | 0.056 |
| 5X | 1 | 2 | (T/C) % | 95 | 107 | 116 | 120 | 115 | 117 | 117 | 109 | 113 |
| 5X | 1 | 2 | p-value | 0.35 | 0.06 | 0.00 | 0.00 | 0.05 | 0.02 | 0.03 | 0.01 | 0.00 |
| 5X | 2 | 2 | Event (T) | 159.0 | 3.4 | 11.0 | 0.523 | 0.256 | 0.399 | 0.258 | 0.485 | 0.580 |
| 5X | 2 | 2 | Control (C) | 172.6 | 3.4 | 9.5 | 0.422 | 0.229 | 0.335 | 0.228 | 0.434 | 0.504 |
| 5X | 2 | 2 | T − C | −13.6 | 0.0 | 1.5 | 0.101 | 0.027 | 0.064 | 0.030 | 0.051 | 0.076 |
| 5X | 2 | 2 | (T/C) % | 92 | 100 | 116 | 124 | 112 | 119 | 113 | 112 | 115 |
| 5X | 2 | 2 | p-value | 0.22 | 0.96 | 0.11 | 0.20 | 0.21 | 0.02 | 0.02 | 0.21 | 0.22 |
| 5Y | All | 1 | Event (T) | 135.2 | 5.0 | 10.6 | 0.440 | 0.214 | 0.394 | 0.224 | 0.430 | 0.557 |
| 5Y | All | 1 | Control (C) | 148.3 | 4.7 | 9.0 | 0.372 | 0.190 | 0.348 | 0.203 | 0.385 | 0.478 |
| 5Y | All | 1 | T − C | −13.1 | 0.3 | 1.6 | 0.068 | 0.024 | 0.046 | 0.021 | 0.045 | 0.079 |
| 5Y | All | 1 | (T/C) % | 91 | 106 | 118 | 118 | 113 | 113 | 110 | 112 | 117 |
| 5Y | All | 1 | p-value | 0.26 | 0.01 | 0.00 | 0.00 | 0.03 | 0.01 | 0.01 | 0.00 | 0.00 |
| 5Y | 1 | 1 | Event (T) | 137.6 | 5.7 | 9.7 | 0.342 | 0.162 | 0.404 | 0.184 | 0.306 | 0.472 |
| 5Y | 1 | 1 | Control (C) | 137.1 | 5.3 | 8.6 | 0.297 | 0.148 | 0.350 | 0.162 | 0.282 | 0.427 |
| 5Y | 1 | 1 | T − C | 0.5 | 0.4 | 1.1 | 0.045 | 0.014 | 0.054 | 0.022 | 0.024 | 0.045 |
| 5Y | 1 | 1 | (T/C) % | 100 | 108 | 113 | 115 | 109 | 115 | 114 | 109 | 111 |
| 5Y | 1 | 1 | p-value | 0.97 | 0.10 | 0.01 | 0.01 | 0.19 | 0.07 | 0.04 | 0.08 | 0.04 |
| 5Y | 2 | 1 | Event (T) | 153.6 | 4.3 | 11.2 | 0.548 | 0.258 | 0.410 | 0.265 | 0.538 | 0.619 |
| 5Y | 2 | 1 | Control (C) | 175.0 | 4.0 | 9.8 | 0.470 | 0.231 | 0.362 | 0.242 | 0.492 | 0.548 |
| 5Y | 2 | 1 | T − C | −21.4 | 0.3 | 1.4 | 0.078 | 0.027 | 0.048 | 0.023 | 0.046 | 0.071 |
| 5Y | 2 | 1 | (T/C) % | 88 | 108 | 114 | 117 | 112 | 113 | 110 | 109 | 113 |
| 5Y | 2 | 1 | p-value | 0.02 | 0.07 | 0.07 | 0.15 | 0.09 | 0.17 | 0.08 | 0.18 | 0.10 |
| 5Y | All | 2 | Event (T) | 149.5 | 4.0 | 10.2 | 0.411 | 0.205 | 0.375 | 0.206 | 0.387 | 0.524 |
| 5Y | All | 2 | Control (C) | 165.8 | 3.9 | 9.1 | 0.355 | 0.191 | 0.319 | 0.196 | 0.359 | 0.468 |
| 5Y | All | 2 | T − C | −16.3 | 0.1 | 1.1 | 0.056 | 0.014 | 0.056 | 0.010 | 0.028 | 0.056 |
| 5Y | All | 2 | (T/C) % | 90 | 103 | 112 | 116 | 107 | 118 | 105 | 108 | 112 |
| 5Y | All | 2 | p-value | 0.04 | 0.45 | 0.00 | 0.00 | 0.10 | 0.00 | 0.26 | 0.02 | 0.00 |
| 5Y | 1 | 2 | Event (T) | 145.4 | 4.6 | 10.1 | 0.351 | 0.172 | 0.366 | 0.180 | 0.314 | 0.492 |
| 5Y | 1 | 2 | Control (C) | 152.6 | 4.4 | 8.8 | 0.290 | 0.152 | 0.303 | 0.163 | 0.289 | 0.436 |
| 5Y | 1 | 2 | T − C | −7.2 | 0.2 | 1.3 | 0.061 | 0.020 | 0.063 | 0.017 | 0.025 | 0.056 |
| 5Y | 1 | 2 | (T/C) % | 95 | 105 | 115 | 121 | 113 | 121 | 110 | 109 | 113 |
| 5Y | 1 | 2 | p-value | 0.37 | 0.18 | 0.00 | 0.00 | 0.10 | 0.00 | 0.11 | 0.04 | 0.00 |
| 5Y | 2 | 2 | Event (T) | 162.3 | 3.4 | 10.3 | 0.471 | 0.236 | 0.387 | 0.237 | 0.458 | 0.555 |
| 5Y | 2 | 2 | Control (C) | 172.6 | 3.4 | 9.5 | 0.422 | 0.229 | 0.335 | 0.228 | 0.434 | 0.504 |
| 5Y | 2 | 2 | T − C | −10.3 | 0.0 | 0.8 | 0.049 | 0.007 | 0.052 | 0.009 | 0.024 | 0.051 |
| 5Y | 2 | 2 | (T/C) % | 94 | 100 | 108 | 112 | 103 | 116 | 104 | 106 | 110 |
| 5Y | 2 | 2 | p-value | 0.23 | 0.38 | 0.22 | 0.16 | 0.58 | 0.00 | 0.53 | 0.22 | 0.16 |
| 5Z | All | 1 | Event (T) | 135.2 | 5.1 | 9.6 | 0.400 | 0.198 | 0.361 | 0.218 | 0.392 | 0.492 |
| 5Z | All | 1 | Control (C) | 148.3 | 4.7 | 9.0 | 0.372 | 0.190 | 0.348 | 0.203 | 0.385 | 0.478 |
| 5Z | All | 1 | T − C | −13.1 | 0.4 | 0.6 | 0.028 | 0.008 | 0.013 | 0.015 | 0.007 | 0.014 |
| 5Z | All | 1 | (T/C) % | 91 | 109 | 106 | 108 | 104 | 104 | 107 | 102 | 103 |
| 5Z | All | 1 | p-value | 0.23 | 0.01 | 0.09 | 0.20 | 0.50 | 0.46 | 0.15 | 0.68 | 0.49 |
| 5Z | 1 | 1 | Event (T) | 137.6 | 5.7 | 9.7 | 0.342 | 0.162 | 0.404 | 0.184 | 0.306 | 0.472 |
| 5Z | 1 | 1 | Control (C) | 137.1 | 5.3 | 8.6 | 0.297 | 0.148 | 0.350 | 0.162 | 0.282 | 0.427 |
| 5Z | 1 | 1 | T − C | 0.5 | 0.4 | 1.1 | 0.045 | 0.014 | 0.054 | 0.022 | 0.024 | 0.045 |
| 5Z | 1 | 1 | (T/C) % | 100 | 108 | 113 | 115 | 109 | 115 | 114 | 109 | 111 |
| 5Z | 1 | 1 | p-value | 0.97 | 0.10 | 0.01 | 0.01 | 0.19 | 0.07 | 0.04 | 0.08 | 0.04 |
| 5Z | 2 | 1 | Event (T) | 157.1 | 4.4 | 10.4 | 0.518 | 0.245 | 0.408 | 0.259 | 0.510 | 0.580 |
| 5Z | 2 | 1 | Control (C) | 175.0 | 4.0 | 9.8 | 0.470 | 0.231 | 0.362 | 0.242 | 0.492 | 0.548 |
| 5Z | 2 | 1 | T − C | −17.9 | 0.4 | 0.6 | 0.048 | 0.014 | 0.046 | 0.017 | 0.018 | 0.032 |
| 5Z | 2 | 1 | (T/C) % | 90 | 110 | 106 | 110 | 106 | 113 | 107 | 104 | 106 |
| 5Z | 2 | 1 | p-value | 0.01 | 0.05 | 0.00 | 0.08 | 0.07 | 0.22 | 0.03 | 0.12 | 0.07 |
| 5Z | All | 2 | Event (T) | 151.5 | 4.1 | 10.3 | 0.402 | 0.200 | 0.367 | 0.206 | 0.383 | 0.514 |
| 5Z | All | 2 | Control (C) | 165.8 | 3.9 | 9.1 | 0.355 | 0.191 | 0.319 | 0.196 | 0.359 | 0.468 |
| 5Z | All | 2 | T − C | −14.3 | 0.2 | 1.2 | 0.047 | 0.009 | 0.048 | 0.010 | 0.024 | 0.046 |
| 5Z | All | 2 | (T/C) % | 91 | 105 | 113 | 113 | 105 | 115 | 105 | 107 | 110 |
| 5Z | All | 2 | p-value | 0.13 | 0.08 | 0.00 | 0.00 | 0.28 | 0.00 | 0.20 | 0.02 | 0.00 |
| 5Z | 1 | 2 | Event (T) | 145.4 | 4.6 | 10.1 | 0.351 | 0.172 | 0.366 | 0.180 | 0.314 | 0.492 |
| 5Z | 1 | 2 | Control (C) | 152.6 | 4.4 | 8.8 | 0.290 | 0.152 | 0.303 | 0.163 | 0.289 | 0.436 |
| 5Z | 1 | 2 | T − C | −7.2 | 0.2 | 1.3 | 0.061 | 0.020 | 0.063 | 0.017 | 0.025 | 0.056 |
| 5Z | 1 | 2 | (T/C) % | 95 | 105 | 115 | 121 | 113 | 121 | 110 | 109 | 113 |
| 5Z | 1 | 2 | p-value | 0.37 | 0.18 | 0.00 | 0.00 | 0.10 | 0.00 | 0.11 | 0.04 | 0.00 |
| 5Z | 2 | 2 | Event (T) | 163.2 | 3.5 | 10.8 | 0.494 | 0.241 | 0.389 | 0.233 | 0.473 | 0.566 |
| 5Z | 2 | 2 | Control (C) | 172.6 | 3.4 | 9.5 | 0.422 | 0.229 | 0.335 | 0.228 | 0.434 | 0.504 |
| 5Z | 2 | 2 | T − C | −9.4 | 0.1 | 1.3 | 0.072 | 0.012 | 0.054 | 0.005 | 0.039 | 0.062 |
| 5Z | 2 | 2 | (T/C) % | 95 | 103 | 114 | 117 | 105 | 116 | 102 | 109 | 112 |
| 5Z | 2 | 2 | p-value | 0.65 | 0.19 | 0.37 | 0.06 | 0.83 | 0.07 | 0.83 | 0.21 | 0.19 |
| 5A1 | All | 1 | Event (T) | 138.7 | 5.0 | 10.0 | 0.432 | 0.207 | 0.398 | 0.210 | 0.410 | 0.518 |
| 5A1 | All | 1 | Control (C) | 148.0 | 4.7 | 9.1 | 0.373 | 0.190 | 0.348 | 0.203 | 0.386 | 0.479 |
| 5A1 | All | 1 | T − C | −9.3 | 0.3 | 0.9 | 0.059 | 0.017 | 0.050 | 0.007 | 0.024 | 0.039 |
| 5A1 | All | 1 | (T/C) % | 94 | 106 | 110 | 116 | 109 | 114 | 103 | 106 | 108 |
| 5A1 | All | 1 | p-value | 0.31 | 0.00 | 0.00 | 0.00 | 0.10 | 0.00 | 0.38 | 0.04 | 0.02 |
| 5A1 | 1 | 1 | Event (T) | 138.1 | 5.8 | 9.0 | 0.313 | 0.138 | 0.412 | 0.154 | 0.282 | 0.425 |
| 5A1 | 1 | 1 | Control (C) | 137.1 | 5.4 | 8.6 | 0.300 | 0.146 | 0.362 | 0.162 | 0.278 | 0.423 |
| 5A1 | 1 | 1 | T − C | 1.0 | 0.4 | 0.4 | 0.013 | −0.008 | 0.050 | −0.008 | 0.004 | 0.002 |
| 5A1 | 1 | 1 | (T/C) % | 101 | 107 | 105 | 104 | 95 | 114 | 95 | 101 | 100 |
| 5A1 | 1 | 1 | p-value | 0.95 | 0.01 | 0.35 | 0.49 | 0.43 | 0.11 | 0.24 | 0.70 | 0.92 |
| 5A1 | 2 | 1 | Event (T) | 149.3 | 4.3 | 10.8 | 0.536 | 0.252 | 0.409 | 0.252 | 0.518 | 0.592 |
| 5A1 | 2 | 1 | Control (C) | 175.0 | 4.0 | 9.8 | 0.470 | 0.231 | 0.362 | 0.242 | 0.492 | 0.548 |
| 5A1 | 2 | 1 | T − C | −25.7 | 0.3 | 1.0 | 0.066 | 0.021 | 0.047 | 0.010 | 0.026 | 0.044 |
| 5A1 | 2 | 1 | (T/C) % | 85 | 108 | 110 | 114 | 109 | 113 | 104 | 105 | 108 |
| 5A1 | 2 | 1 | p-value | 0.04 | 0.00 | 0.21 | 0.11 | 0.11 | 0.01 | 0.22 | 0.17 | 0.16 |
| 5A1 | All | 2 | Event (T) | 142.5 | 4.0 | 10.5 | 0.424 | 0.210 | 0.367 | 0.220 | 0.400 | 0.531 |
| 5A1 | All | 2 | Control (C) | 165.8 | 3.9 | 9.1 | 0.355 | 0.191 | 0.319 | 0.196 | 0.359 | 0.468 |
| 5A1 | All | 2 | T − C | −23.3 | 0.1 | 1.3 | 0.069 | 0.019 | 0.048 | 0.024 | 0.041 | 0.063 |
| 5A1 | All | 2 | (T/C) % | 86 | 103 | 115 | 119 | 110 | 115 | 112 | 111 | 113 |
| 5A1 | All | 2 | p-value | 0.01 | 0.19 | 0.00 | 0.00 | 0.03 | 0.00 | 0.00 | 0.00 | 0.00 |
| 5A1 | 1 | 2 | Event (T) | 132.5 | 4.7 | 10.2 | 0.323 | 0.159 | 0.344 | 0.169 | 0.311 | 0.476 |
| 5A1 | 1 | 2 | Control (C) | 152.6 | 4.4 | 8.8 | 0.290 | 0.152 | 0.303 | 0.163 | 0.289 | 0.436 |
| 5A1 | 1 | 2 | T − C | −20.1 | 0.3 | 1.4 | 0.033 | 0.007 | 0.041 | 0.006 | 0.022 | 0.040 |
| 5A1 | 1 | 2 | (T/C) % | 87 | 107 | 116 | 111 | 105 | 114 | 104 | 108 | 109 |
| 5A1 | 1 | 2 | p-value | 0.02 | 0.08 | 0.00 | 0.05 | 0.64 | 0.02 | 0.63 | 0.06 | 0.03 |
| 5A1 | 2 | 2 | Event (T) | 152.7 | 3.4 | 11.1 | 0.535 | 0.268 | 0.396 | 0.278 | 0.496 | 0.597 |
| 5A1 | 2 | 2 | Control (C) | 172.6 | 3.4 | 9.5 | 0.422 | 0.229 | 0.335 | 0.228 | 0.434 | 0.504 |
| 5A1 | 2 | 2 | T − C | −19.9 | 0.0 | 1.6 | 0.113 | 0.039 | 0.061 | 0.050 | 0.062 | 0.093 |
| 5A1 | 2 | 2 | (T/C) % | 88 | 100 | 117 | 127 | 117 | 118 | 122 | 114 | 118 |
| 5A1 | 2 | 2 | p-value | 0.03 | 0.98 | 0.08 | 0.01 | 0.01 | 0.01 | 0.05 | 0.02 | 0.02 |
| 5B1 | All | 1 | Event (T) | 127.7 | 4.9 | 10.6 | 0.438 | 0.215 | 0.375 | 0.222 | 0.422 | 0.540 |
| 5B1 | All | 1 | Control (C) | 148.3 | 4.7 | 9.0 | 0.372 | 0.190 | 0.348 | 0.203 | 0.385 | 0.478 |
| 5B1 | All | 1 | T − C | −20.6 | 0.2 | 1.6 | 0.066 | 0.025 | 0.027 | 0.019 | 0.037 | 0.062 |
| 5B1 | All | 1 | (T/C) % | 86 | 104 | 117 | 118 | 113 | 108 | 109 | 110 | 113 |
| 5B1 | All | 1 | p-value | 0.05 | 0.06 | 0.00 | 0.00 | 0.01 | 0.06 | 0.02 | 0.00 | 0.00 |
| 5B1 | 1 | 1 | Event (T) | 109.7 | 5.7 | 9.9 | 0.347 | 0.182 | 0.369 | 0.190 | 0.313 | 0.472 |
| 5B1 | 1 | 1 | Control (C) | 137.1 | 5.4 | 8.8 | 0.305 | 0.164 | 0.343 | 0.171 | 0.296 | 0.434 |
| 5B1 | 1 | 1 | T − C | −27.4 | 0.3 | 1.1 | 0.042 | 0.018 | 0.026 | 0.019 | 0.017 | 0.038 |
| 5B1 | 1 | 1 | (T/C) % | 80 | 106 | 112 | 114 | 111 | 108 | 111 | 106 | 109 |
| 5B1 | 1 | 1 | p-value | 0.08 | 0.20 | 0.01 | 0.01 | 0.16 | 0.26 | 0.03 | 0.20 | 0.02 |
| 5B1 | 2 | 1 | Event (T) | 156.6 | 4.0 | 11.3 | 0.529 | 0.252 | 0.378 | 0.259 | 0.535 | 0.612 |
| 5B1 | 2 | 1 | Control (C) | 175.0 | 4.0 | 9.8 | 0.470 | 0.231 | 0.362 | 0.242 | 0.492 | 0.548 |
| 5B1 | 2 | 1 | T − C | −18.4 | 0.0 | 1.5 | 0.059 | 0.021 | 0.016 | 0.017 | 0.043 | 0.064 |
| 5B1 | 2 | 1 | (T/C) % | 89 | 100 | 115 | 113 | 109 | 104 | 107 | 109 | 112 |
| 5B1 | 2 | 1 | p-value | 0.00 | 0.40 | 0.14 | 0.09 | 0.00 | 0.09 | 0.05 | 0.12 | 0.06 |
| 5B1 | All | 2 | Event (T) | 147.1 | 3.9 | 9.6 | 0.388 | 0.203 | 0.335 | 0.216 | 0.384 | 0.506 |
| 5B1 | All | 2 | Control (C) | 165.8 | 3.9 | 9.1 | 0.355 | 0.191 | 0.319 | 0.196 | 0.359 | 0.468 |
| 5B1 | All | 2 | T − C | −18.7 | 0.0 | 0.5 | 0.033 | 0.012 | 0.016 | 0.020 | 0.025 | 0.038 |
| 5B1 | All | 2 | (T/C) % | 89 | 100 | 105 | 109 | 106 | 105 | 110 | 107 | 108 |
| 5B1 | All | 2 | p-value | 0.04 | 0.69 | 0.14 | 0.06 | 0.23 | 0.30 | 0.02 | 0.03 | 0.02 |
| 5B1 | 1 | 2 | Event (T) | 130.2 | 4.8 | 9.6 | 0.340 | 0.176 | 0.351 | 0.178 | 0.310 | 0.482 |
| 5B1 | 1 | 2 | Control (C) | 152.6 | 4.4 | 8.8 | 0.290 | 0.152 | 0.303 | 0.163 | 0.289 | 0.436 |
| 5B1 | 1 | 2 | T − C | −22.4 | 0.4 | 0.8 | 0.050 | 0.024 | 0.048 | 0.015 | 0.021 | 0.046 |
| 5B1 | 1 | 2 | (T/C) % | 85 | 109 | 109 | 117 | 116 | 116 | 109 | 107 | 111 |
| 5B1 | 1 | 2 | p-value | 0.01 | 0.03 | 0.12 | 0.01 | 0.10 | 0.02 | 0.18 | 0.10 | 0.02 |
| 5B1 | 2 | 2 | Event (T) | 168.2 | 3.4 | 10.0 | 0.456 | 0.245 | 0.331 | 0.260 | 0.459 | 0.545 |
| 5B1 | 2 | 2 | Control (C) | 172.6 | 3.4 | 9.5 | 0.418 | 0.228 | 0.333 | 0.234 | 0.427 | 0.499 |
| 5B1 | 2 | 2 | T − C | −4.4 | 0.0 | 0.5 | 0.038 | 0.017 | −0.002 | 0.026 | 0.032 | 0.046 |
| 5B1 | 2 | 2 | (T/C) % | 97 | 100 | 105 | 109 | 107 | 99 | 111 | 107 | 109 |
| 5B1 | 2 | 2 | p-value | 0.38 | 0.31 | 0.42 | 0.82 | 0.08 | 0.71 | 0.05 | 0.54 | 0.53 |
| 5C1 | All | 1 | Event (T) | 149.0 | 4.8 | 11.2 | 0.458 | 0.241 | 0.379 | 0.236 | 0.439 | 0.571 |
| 5C1 | All | 1 | Control (C) | 148.3 | 4.7 | 9.0 | 0.372 | 0.190 | 0.348 | 0.203 | 0.385 | 0.478 |
| 5C1 | All | 1 | T − C | 0.7 | 0.1 | 2.1 | 0.086 | 0.051 | 0.031 | 0.033 | 0.054 | 0.093 |
| 5C1 | All | 1 | (T/C) % | 100 | 102 | 123 | 123 | 127 | 109 | 116 | 114 | 119 |
| 5C1 | All | 1 | p-value | 0.95 | 0.51 | 0.00 | 0.00 | 0.00 | 0.06 | 0.00 | 0.00 | 0.00 |
| 5C1 | 1 | 1 | Event (T) | 131.5 | 5.5 | 10.4 | 0.343 | 0.182 | 0.373 | 0.189 | 0.314 | 0.485 |
| 5C1 | 1 | 1 | Control (C) | 137.1 | 5.3 | 8.6 | 0.297 | 0.148 | 0.350 | 0.162 | 0.282 | 0.427 |
| 5C1 | 1 | 1 | T − C | −5.6 | 0.2 | 1.8 | 0.046 | 0.034 | 0.023 | 0.027 | 0.032 | 0.058 |
| 5C1 | 1 | 1 | (T/C) % | 96 | 104 | 121 | 115 | 123 | 107 | 117 | 111 | 114 |
| 5C1 | 1 | 1 | p-value | 0.73 | 0.51 | 0.00 | 0.05 | 0.10 | 0.38 | 0.00 | 0.09 | 0.04 |
| 5C1 | 2 | 1 | Event (T) | 176.4 | 4.2 | 11.3 | 0.527 | 0.265 | 0.378 | 0.270 | 0.528 | 0.609 |
| 5C1 | 2 | 1 | Control (C) | 175.0 | 4.0 | 9.8 | 0.470 | 0.231 | 0.362 | 0.242 | 0.492 | 0.548 |
| 5C1 | 2 | 1 | T − C | 1.4 | 0.2 | 1.5 | 0.057 | 0.034 | 0.016 | 0.028 | 0.036 | 0.061 |
| 5C1 | 2 | 1 | (T/C) % | 101 | 105 | 115 | 112 | 115 | 104 | 112 | 107 | 111 |
| 5C1 | 2 | 1 | p-value | 0.63 | 0.04 | 0.05 | 0.02 | 0.06 | 0.17 | 0.01 | 0.13 | 0.08 |
| 5C1 | All | 2 | Event (T) | 161.5 | 4.1 | 10.3 | 0.422 | 0.220 | 0.353 | 0.220 | 0.401 | 0.534 |
| 5C1 | All | 2 | Control (C) | 165.8 | 3.9 | 9.1 | 0.355 | 0.191 | 0.319 | 0.196 | 0.359 | 0.468 |
| 5C1 | All | 2 | T − C | −4.3 | 0.2 | 1.1 | 0.067 | 0.029 | 0.034 | 0.024 | 0.042 | 0.066 |
| 5C1 | All | 2 | (T/C) % | 97 | 105 | 112 | 119 | 115 | 111 | 112 | 112 | 114 |
| 5C1 | All | 2 | p-value | 0.63 | 0.13 | 0.00 | 0.00 | 0.00 | 0.01 | 0.00 | 0.00 | 0.00 |
| 5C1 | 1 | 2 | Event (T) | 160.2 | 4.7 | 10.0 | 0.339 | 0.190 | 0.316 | 0.193 | 0.319 | 0.489 |
| 5C1 | 1 | 2 | Control (C) | 152.6 | 4.4 | 8.8 | 0.290 | 0.152 | 0.303 | 0.163 | 0.289 | 0.436 |
| 5C1 | 1 | 2 | T − C | 7.6 | 0.3 | 1.2 | 0.049 | 0.038 | 0.013 | 0.030 | 0.030 | 0.053 |
| 5C1 | 1 | 2 | (T/C) % | 105 | 107 | 114 | 117 | 125 | 104 | 118 | 110 | 112 |
| 5C1 | 1 | 2 | p-value | 0.36 | 0.08 | 0.00 | 0.01 | 0.01 | 0.44 | 0.01 | 0.02 | 0.00 |
| 5C1 | 2 | 2 | Event (T) | 163.8 | 3.5 | 11.0 | 0.531 | 0.268 | 0.400 | 0.261 | 0.502 | 0.596 |
| 5C1 | 2 | 2 | Control (C) | 172.6 | 3.4 | 9.5 | 0.422 | 0.229 | 0.335 | 0.228 | 0.434 | 0.504 |
| 5C1 | 2 | 2 | T − C | −8.8 | 0.1 | 1.5 | 0.109 | 0.039 | 0.065 | 0.033 | 0.068 | 0.092 |
| 5C1 | 2 | 2 | (T/C) % | 95 | 103 | 116 | 126 | 117 | 119 | 114 | 116 | 118 |
| 5C1 | 2 | 2 | p-value | 0.03 | 0.35 | 0.00 | 0.00 | 0.03 | 0.01 | 0.20 | 0.00 | 0.00 |

TABLE 39
Summary of field data for Construct 6. Numbers shown in bold are significantly different from
the control at the p-value shown. bu/a is bushels per acre. “All” indicates the average
across all events or testers. (T/C) % is the value for the transgenic hybrid combination (T)
expressed as a percent of the control (C).

| | | Yield | Oil | Prot | Arg | Cys | Lys | Met | Thr | Val |
|---|---|---|---|---|---|---|---|---|---|---|
| | | (bu/a) | (%) | (%) | (%) | (%) | (%) | (%) | (%) | (%) |
| Event | Description | p <= 0.10 | p <= 0.15 | p <= 0.15 | p <= 0.15 | p <= 0.15 | p <= 0.15 | p <= 0.15 | p <= 0.15 | p <= 0.15 |
| All | (T/C) % | 103 | 102 | 101 | 100 | 102 | 98 | 101 | 100 | 101 |
| 6D1 | (T/C) % | 103 | 102 | 94 | 96 | 99 | 101 | 95 | 96 | 96 |
| 6E1 | (T/C) % | 102 | 102 | 100 | 96 | 103 | 97 | 101 | 97 | 98 |
| 6F1 | (T/C) % | 94 | 96 | 109 | 104 | 113 | 92 | 107 | 104 | 106 |
| 6G1 | (T/C) % | 105 | 104 | 104 | 105 | 105 | 97 | 103 | 102 | 105 |
| 6H1 | (T/C) % | 105 | 104 | 102 | 105 | 108 | 106 | 100 | 101 | 102 |
| 6I1 | (T/C) % | 96 | 102 | 99 | 97 | 101 | 93 | 101 | 98 | 99 |
| 6J1 | (T/C) % | 113 | 102 | 101 | 100 | 103 | 94 | 104 | 99 | 102 |
| 6K1 | (T/C) % | 108 | 100 | 101 | 100 | 96 | 99 | 96 | 100 | 102 |
| 6L1 | (T/C) % | 107 | 100 | 104 | 104 | 99 | 106 | 99 | 103 | 104 |
| 6M1 | (T/C) % | 90 | 102 | 82 | 98 | 96 | 112 | 97 | 93 | 93 |

TABLE 40
Field data for Construct 6. Numbers shown in bold are significantly different from the control
at the p-value shown. bu/a is bushels per acre. “All” indicates the average across all events
or testers. (T/C) % is the value for the transgenic hybrid combination (T) expressed as a percent of
the control (C). T − C is the transgenic hybrid combination minus the control. Oil, protein, and
amino acid content are shown as percent of seed dry weight.

| | | Yield | Oil | Prot | Arg | Cys | Lys | Met | Thr | Val |
|---|---|---|---|---|---|---|---|---|---|---|
| | | (bu/a) | (%) | (%) | (%) | (%) | (%) | (%) | (%) | (%) |
| Event | Description | p <= 0.10 | p <= 0.15 | p <= 0.15 | p <= 0.15 | p <= 0.15 | p <= 0.15 | p <= 0.15 | p <= 0.15 | p <= 0.15 |
| All | Construct (T) | 146.4 | 4.9 | 9.0 | 0.296 | 0.151 | 0.325 | 0.170 | 0.300 | 0.437 |
| All | Control (C) | 142.4 | 4.8 | 8.9 | 0.295 | 0.148 | 0.332 | 0.169 | 0.301 | 0.432 |
| All | T − C | 4.0 | 0.1 | 0.1 | 0.001 | 0.003 | −0.007 | 0.001 | −0.001 | 0.005 |
| All | (T/C) % | 103 | 102 | 101 | 100 | 102 | 98 | 101 | 100 | 101 |
| All | p-value | 0.42 | 0.53 | 0.55 | 0.81 | 0.52 | 0.25 | 0.86 | 0.94 | 0.57 |
| 6D1 | Event (T) | 147.3 | 5.0 | 8.3 | 0.280 | 0.147 | 0.332 | 0.160 | 0.285 | 0.407 |
| 6D1 | Control (C) | 142.4 | 4.9 | 8.8 | 0.291 | 0.149 | 0.329 | 0.169 | 0.298 | 0.425 |
| 6D1 | T − C | 4.9 | 0.1 | −0.5 | −0.011 | −0.002 | 0.003 | −0.009 | −0.013 | −0.018 |
| 6D1 | (T/C) % | 103 | 102 | 94 | 96 | 99 | 101 | 95 | 96 | 96 |
| 6D1 | p-value | 0.60 | 0.68 | 0.04 | 0.48 | 0.86 | 0.81 | 0.24 | 0.20 | 0.33 |
| 6E1 | Event (T) | 145.4 | 4.9 | 8.9 | 0.283 | 0.152 | 0.319 | 0.172 | 0.292 | 0.422 |
| 6E1 | Control (C) | 142.4 | 4.8 | 8.9 | 0.294 | 0.148 | 0.330 | 0.170 | 0.300 | 0.431 |
| 6E1 | T − C | 3.0 | 0.1 | 0.0 | −0.011 | 0.004 | −0.011 | 0.002 | −0.008 | −0.009 |
| 6E1 | (T/C) % | 102 | 102 | 100 | 96 | 103 | 97 | 101 | 97 | 98 |
| 6E1 | p-value | 0.74 | 0.82 | 0.81 | 0.39 | 0.66 | 0.34 | 0.72 | 0.37 | 0.55 |
| 6F1 | Event (T) | 133.2 | 4.7 | 9.8 | 0.304 | 0.162 | 0.299 | 0.180 | 0.313 | 0.457 |
| 6F1 | Control (C) | 142.4 | 4.9 | 9.0 | 0.292 | 0.143 | 0.324 | 0.168 | 0.300 | 0.433 |
| 6F1 | T − C | −9.2 | −0.2 | 0.8 | 0.012 | 0.019 | −0.025 | 0.012 | 0.013 | 0.024 |
| 6F1 | (T/C) % | 94 | 96 | 109 | 104 | 113 | 92 | 107 | 104 | 106 |
| 6F1 | p-value | 0.31 | 0.55 | 0.01 | 0.47 | 0.10 | 0.06 | 0.19 | 0.31 | 0.27 |
| 6G1 | Event (T) | 149.8 | 5.0 | 9.3 | 0.310 | 0.156 | 0.322 | 0.174 | 0.308 | 0.452 |
| 6G1 | Control (C) | 142.4 | 4.8 | 8.9 | 0.295 | 0.148 | 0.332 | 0.169 | 0.301 | 0.432 |
| 6G1 | T − C | 7.4 | 0.2 | 0.4 | 0.015 | 0.008 | −0.010 | 0.005 | 0.007 | 0.020 |
| 6G1 | (T/C) % | 105 | 104 | 104 | 105 | 105 | 97 | 103 | 102 | 105 |
| 6G1 | p-value | 0.42 | 0.18 | 0.17 | 0.26 | 0.36 | 0.45 | 0.51 | 0.42 | 0.23 |
| 6H1 | Event (T) | 149.9 | 5.0 | 9.2 | 0.306 | 0.154 | 0.340 | 0.168 | 0.304 | 0.440 |
| 6H1 | Control (C) | 142.4 | 4.8 | 9.0 | 0.291 | 0.143 | 0.321 | 0.168 | 0.300 | 0.432 |
| 6H1 | T − C | 7.5 | 0.2 | 0.2 | 0.015 | 0.011 | 0.019 | 0.000 | 0.004 | 0.008 |
| 6H1 | (T/C) % | 105 | 104 | 102 | 105 | 108 | 106 | 100 | 101 | 102 |
| 6H1 | p-value | 0.42 | 0.58 | 0.54 | 0.30 | 0.25 | 0.09 | 1.00 | 0.69 | 0.67 |
| 6I1 | Event (T) | 137.0 | 4.9 | 8.8 | 0.287 | 0.149 | 0.310 | 0.170 | 0.296 | 0.426 |
| 6I1 | Control (C) | 142.4 | 4.8 | 8.9 | 0.295 | 0.148 | 0.332 | 0.169 | 0.301 | 0.432 |
| 6I1 | T − C | −5.4 | 0.1 | −0.1 | −0.008 | 0.001 | −0.022 | 0.001 | −0.005 | −0.006 |
| 6I1 | (T/C) % | 96 | 102 | 99 | 97 | 101 | 93 | 101 | 98 | 99 |
| 6I1 | p-value | 0.56 | 0.80 | 0.68 | 0.46 | 0.87 | 0.04 | 0.93 | 0.56 | 0.72 |
| 6J1 | Event (T) | 161.4 | 4.9 | 9.0 | 0.296 | 0.153 | 0.311 | 0.176 | 0.298 | 0.439 |
| 6J1 | Control (C) | 142.4 | 4.8 | 8.9 | 0.295 | 0.148 | 0.332 | 0.169 | 0.301 | 0.432 |
| 6J1 | T − C | 19.0 | 0.1 | 0.1 | 0.001 | 0.005 | −0.021 | 0.007 | −0.003 | 0.007 |
| 6J1 | (T/C) % | 113 | 102 | 101 | 100 | 103 | 94 | 104 | 99 | 102 |
| 6J1 | p-value | 0.04 | 0.60 | 0.77 | 0.93 | 0.54 | 0.08 | 0.32 | 0.80 | 0.65 |
| 6K1 | Event (T) | 153.9 | 4.8 | 9.0 | 0.295 | 0.142 | 0.327 | 0.163 | 0.299 | 0.439 |
| 6K1 | Control (C) | 142.4 | 4.8 | 8.9 | 0.294 | 0.148 | 0.330 | 0.170 | 0.300 | 0.431 |
| 6K1 | T − C | 11.5 | 0.0 | 0.1 | 0.001 | −0.006 | −0.003 | −0.007 | −0.001 | 0.008 |
| 6K1 | (T/C) % | 108 | 100 | 101 | 100 | 96 | 99 | 96 | 100 | 102 |
| 6K1 | p-value | 0.21 | 0.74 | 0.85 | 0.91 | 0.54 | 0.80 | 0.39 | 0.92 | 0.63 |
| 6L1 | Event (T) | 152.4 | 4.8 | 9.3 | 0.307 | 0.146 | 0.353 | 0.167 | 0.310 | 0.451 |
| 6L1 | Control (C) | 142.4 | 4.8 | 8.9 | 0.295 | 0.148 | 0.332 | 0.169 | 0.301 | 0.432 |
| 6L1 | T − C | 10.0 | 0.0 | 0.4 | 0.012 | −0.002 | 0.021 | −0.002 | 0.009 | 0.019 |
| 6L1 | (T/C) % | 107 | 100 | 104 | 104 | 99 | 106 | 99 | 103 | 104 |
| 6L1 | p-value | 0.28 | 0.96 | 0.15 | 0.32 | 0.88 | 0.07 | 0.78 | 0.28 | 0.24 |
| 6M1 | Event (T) | 130.5 | 4.7 | 7.8 | 0.299 | 0.137 | 0.375 | 0.165 | 0.287 | 0.420 |
| 6M1 | Control (C) | 145.5 | 4.6 | 9.5 | 0.305 | 0.143 | 0.335 | 0.170 | 0.307 | 0.453 |
| 6M1 | T − C | −15.0 | 0.1 | −1.7 | −0.006 | −0.006 | 0.040 | −0.005 | −0.020 | −0.033 |
| 6M1 | (T/C) % | 90 | 102 | 82 | 98 | 96 | 112 | 97 | 93 | 93 |
| 6M1 | p-value | 0.24 | 0.87 | 0.03 | 0.82 | 0.75 | 0.27 | 0.78 | 0.41 | 0.36 |

TABLE 41
Summary of field data for Construct 7. Numbers shown in bold are significantly different from the control
at the p-value shown. bu/a is bushels per acre. “All” indicates the average across all events or testers.
(T/C) % is the value for the transgenic hybrid combination (T) expressed as a percent of the control (C).

| | | Yield | Oil | Prot | Arg | Cys | Lys | Met | Thr | Val |
|---|---|---|---|---|---|---|---|---|---|---|
| | | (bu/a) | (%) | (%) | (%) | (%) | (%) | (%) | (%) | (%) |
| Event | Description | p <= 0.10 | p <= 0.15 | p <= 0.15 | p <= 0.15 | p <= 0.15 | p <= 0.15 | p <= 0.15 | p <= 0.15 | p <= 0.15 |
| All | (T/C) % | 100 | 102 | 100 | 99 | 97 | 100 | 97 | 100 | 100 |
| 7N1 | (T/C) % | 101 | 100 | 100 | 105 | 101 | 102 | 96 | 101 | 104 |
| 7O1 | (T/C) % | 101 | 104 | 99 | 100 | 98 | 99 | 95 | 100 | 101 |
| 7P1 | (T/C) % | 104 | 100 | 106 | 99 | 99 | 97 | 101 | 102 | 102 |
| 7Q1 | (T/C) % | 104 | 104 | 100 | 97 | 94 | 99 | 96 | 99 | 100 |
| 7R1 | (T/C) % | 86 | 102 | 101 | 103 | 96 | 105 | 98 | 99 | 98 |
| 7S1 | (T/C) % | 101 | 100 | 104 | 104 | 103 | 101 | 103 | 103 | 103 |
| 7T1 | (T/C) % | 106 | 100 | 102 | 98 | 97 | 99 | 98 | 98 | 99 |
| 7U1 | (T/C) % | 99 | 102 | 96 | 95 | 93 | 99 | 92 | 96 | 97 |
| 7V1 | (T/C) % | 100 | 100 | 102 | 99 | 100 | 95 | 101 | 100 | 100 |
| 7W1 | (T/C) % | 102 | 104 | 100 | 102 | 94 | 104 | 96 | 101 | 100 |

TABLE 42
Field data for Construct 7. Numbers shown in bold are significantly different from the control
at the p-value shown. bu/a is bushels per acre. “All” indicates the average across all events
or testers. (T/C) % is the value for the transgenic hybrid combination (T) expressed as a percent of
the control (C). T − C is the transgenic hybrid combination minus the control. Oil, protein, and
amino acid content are shown as percent of seed dry weight.

| | | Yield | Oil | Prot | Arg | Cys | Lys | Met | Thr | Val |
|---|---|---|---|---|---|---|---|---|---|---|
| | | (bu/a) | (%) | (%) | (%) | (%) | (%) | (%) | (%) | (%) |
| Event | Description | p <= 0.10 | p <= 0.15 | p <= 0.15 | p <= 0.15 | p <= 0.15 | p <= 0.15 | p <= 0.15 | p <= 0.15 | p <= 0.15 |
| All | Construct (T) | 150.0 | 4.7 | 8.5 | 0.292 | 0.154 | 0.333 | 0.165 | 0.292 | 0.431 |
| All | Control (C) | 149.3 | 4.6 | 8.5 | 0.295 | 0.159 | 0.334 | 0.170 | 0.293 | 0.432 |
| All | T − C | 0.7 | 0.1 | 0.0 | −0.003 | −0.005 | −0.001 | −0.005 | −0.001 | −0.001 |
| All | (T/C) % | 100 | 102 | 100 | 99 | 97 | 100 | 97 | 100 | 100 |
| All | p-value | 0.89 | 0.32 | 0.78 | 0.66 | 0.24 | 0.89 | 0.19 | 0.73 | 0.85 |
| 7N1 | Event (T) | 150.2 | 4.6 | 8.4 | 0.304 | 0.159 | 0.338 | 0.162 | 0.294 | 0.444 |
| 7N1 | Control (C) | 149.3 | 4.6 | 8.4 | 0.290 | 0.157 | 0.332 | 0.168 | 0.290 | 0.428 |
| 7N1 | T − C | 0.9 | 0.0 | 0.0 | 0.014 | 0.002 | 0.006 | −0.006 | 0.004 | 0.016 |
| 7N1 | (T/C) % | 101 | 100 | 100 | 105 | 101 | 102 | 96 | 101 | 104 |
| 7N1 | p-value | 0.92 | 0.93 | 0.91 | 0.31 | 0.71 | 0.64 | 0.23 | 0.71 | 0.31 |
| 7O1 | Event (T) | 151.1 | 4.8 | 8.3 | 0.290 | 0.154 | 0.329 | 0.160 | 0.289 | 0.431 |
| 7O1 | Control (C) | 149.3 | 4.6 | 8.4 | 0.290 | 0.157 | 0.332 | 0.168 | 0.290 | 0.428 |
| 7O1 | T − C | 1.8 | 0.2 | −0.1 | 0.000 | −0.003 | −0.003 | −0.008 | −0.001 | 0.003 |
| 7O1 | (T/C) % | 101 | 104 | 99 | 100 | 98 | 99 | 95 | 100 | 101 |
| 7O1 | p-value | 0.83 | 0.13 | 0.89 | 0.98 | 0.66 | 0.81 | 0.12 | 0.93 | 0.82 |
| 7P1 | Event (T) | 155.5 | 4.6 | 8.9 | 0.287 | 0.156 | 0.322 | 0.170 | 0.295 | 0.435 |
| 7P1 | Control (C) | 149.3 | 4.6 | 8.4 | 0.290 | 0.157 | 0.332 | 0.168 | 0.290 | 0.428 |
| 7P1 | T − C | 6.2 | 0.0 | 0.5 | −0.003 | −0.001 | −0.010 | 0.002 | 0.005 | 0.007 |
| 7P1 | (T/C) % | 104 | 100 | 106 | 99 | 99 | 97 | 101 | 102 | 102 |
| 7P1 | p-value | 0.48 | 0.76 | 0.21 | 0.81 | 0.90 | 0.41 | 0.72 | 0.67 | 0.66 |
| 7Q1 | Event (T) | 154.8 | 4.8 | 8.5 | 0.285 | 0.150 | 0.331 | 0.164 | 0.291 | 0.430 |
| 7Q1 | Control (C) | 149.3 | 4.6 | 8.5 | 0.295 | 0.159 | 0.334 | 0.170 | 0.293 | 0.432 |
| 7Q1 | T − C | 5.5 | 0.2 | 0.0 | −0.010 | −0.009 | −0.003 | −0.006 | −0.002 | −0.002 |
| 7Q1 | (T/C) % | 104 | 104 | 100 | 97 | 94 | 99 | 96 | 99 | 100 |
| 7Q1 | p-value | 0.53 | 0.31 | 0.99 | 0.45 | 0.15 | 0.83 | 0.25 | 0.81 | 0.87 |
| 7R1 | Event (T) | 128.9 | 4.7 | 8.5 | 0.299 | 0.150 | 0.349 | 0.165 | 0.288 | 0.419 |
| 7R1 | Control (C) | 149.3 | 4.6 | 8.4 | 0.290 | 0.157 | 0.332 | 0.168 | 0.290 | 0.428 |
| 7R1 | T − C | −20.4 | 0.1 | 0.1 | 0.009 | −0.007 | 0.017 | −0.003 | −0.002 | −0.009 |
| 7R1 | (T/C) % | 86 | 102 | 101 | 103 | 96 | 105 | 98 | 99 | 98 |
| 7R1 | p-value | 0.02 | 0.47 | 0.84 | 0.55 | 0.27 | 0.24 | 0.61 | 0.84 | 0.59 |
| 7S1 | Event (T) | 151.1 | 4.6 | 8.8 | 0.306 | 0.164 | 0.336 | 0.175 | 0.302 | 0.447 |
| 7S1 | Control (C) | 149.3 | 4.6 | 8.5 | 0.295 | 0.159 | 0.334 | 0.170 | 0.293 | 0.432 |
| 7S1 | T − C | 1.8 | 0.0 | 0.3 | 0.011 | 0.005 | 0.002 | 0.005 | 0.009 | 0.015 |
| 7S1 | (T/C) % | 101 | 100 | 104 | 104 | 103 | 101 | 103 | 103 | 103 |
| 7S1 | p-value | 0.84 | 0.86 | 0.37 | 0.47 | 0.48 | 0.83 | 0.33 | 0.43 | 0.35 |
| 7T1 | Event (T) | 158.3 | 4.6 | 8.6 | 0.284 | 0.152 | 0.329 | 0.165 | 0.285 | 0.422 |
| 7T1 | Control (C) | 149.3 | 4.6 | 8.4 | 0.290 | 0.157 | 0.332 | 0.168 | 0.290 | 0.428 |
| 7T1 | T − C | 9.0 | 0.0 | 0.2 | −0.006 | −0.005 | −0.003 | −0.003 | −0.005 | −0.006 |
| 7T1 | (T/C) % | 106 | 100 | 102 | 98 | 97 | 99 | 98 | 98 | 99 |
| 7T1 | p-value | 0.31 | 0.61 | 0.64 | 0.63 | 0.42 | 0.79 | 0.55 | 0.64 | 0.70 |
| 7U1 | Event (T) | 147.1 | 4.7 | 8.2 | 0.279 | 0.148 | 0.331 | 0.156 | 0.282 | 0.419 |
| 7U1 | Control (C) | 149.3 | 4.6 | 8.5 | 0.295 | 0.159 | 0.334 | 0.170 | 0.293 | 0.432 |
| 7U1 | T − C | −2.2 | 0.1 | −0.3 | −0.016 | −0.011 | −0.003 | −0.014 | −0.011 | −0.013 |
| 7U1 | (T/C) % | 99 | 102 | 96 | 95 | 93 | 99 | 92 | 96 | 97 |
| 7U1 | p-value | 0.80 | 0.42 | 0.39 | 0.30 | 0.15 | 0.83 | 0.02 | 0.30 | 0.42 |
| 7V1 | Event (T) | 149.5 | 4.6 | 8.7 | 0.291 | 0.159 | 0.317 | 0.172 | 0.294 | 0.431 |
| 7V1 | Control (C) | 149.3 | 4.6 | 8.5 | 0.295 | 0.159 | 0.334 | 0.170 | 0.293 | 0.432 |
| 7V1 | T − C | 0.2 | 0.0 | 0.2 | −0.004 | 0.000 | −0.017 | 0.002 | 0.001 | −0.001 |
| 7V1 | (T/C) % | 100 | 100 | 102 | 99 | 100 | 95 | 101 | 100 | 100 |
| 7V1 | p-value | 0.98 | 0.96 | 0.50 | 0.75 | 0.98 | 0.18 | 0.64 | 0.96 | 0.92 |
| 7W1 | Event (T) | 152.2 | 4.8 | 8.4 | 0.296 | 0.148 | 0.346 | 0.161 | 0.293 | 0.428 |
| 7W1 | Control (C) | 149.3 | 4.6 | 8.4 | 0.290 | 0.157 | 0.332 | 0.168 | 0.290 | 0.428 |
| 7W1 | T − C | 2.9 | 0.2 | 0.0 | 0.006 | −0.009 | 0.014 | −0.007 | 0.003 | 0.000 |
| 7W1 | (T/C) % | 102 | 104 | 100 | 102 | 94 | 104 | 96 | 101 | 100 |
| 7W1 | p-value | 0.75 | 0.07 | 0.99 | 0.64 | 0.12 | 0.24 | 0.13 | 0.73 | 0.99 |

TABLE 43
Summary of field data for Construct 8. Numbers shown in bold are significantly different from the control
at the p-value shown. bu/a is bushels per acre. “All” indicates the average across all events or testers.
(T/C) % is the value for the transgenic hybrid combination (T) expressed as a percent of the control (C).

| | | Yield | Oil | Prot | Arg | Cys | Lys | Met | Thr | Val |
|---|---|---|---|---|---|---|---|---|---|---|
| | | (bu/a) | (%) | (%) | (%) | (%) | (%) | (%) | (%) | (%) |
| Event | Description | p <= 0.10 | p <= 0.15 | p <= 0.15 | p <= 0.15 | p <= 0.15 | p <= 0.15 | p <= 0.15 | p <= 0.15 | p <= 0.15 |
| All | (T/C) % | 98 | 100 | 102 | 101 | 97 | 100 | 92 | 101 | 102 |
| 8X1 | (T/C) % | 93 | 100 | 103 | 101 | 92 | 101 | 90 | 101 | 102 |
| 8Y1 | (T/C) % | 97 | 98 | 103 | 107 | 102 | 104 | 94 | 102 | 103 |
| 8Z1 | (T/C) % | 105 | 98 | 102 | 97 | 92 | 95 | 95 | 100 | 100 |
| 8A2 | (T/C) % | 106 | 98 | 103 | 102 | 96 | 102 | 92 | 102 | 103 |
| 8B2 | (T/C) % | 97 | 98 | 106 | 107 | 112 | 104 | 100 | 106 | 108 |
| 8C2 | (T/C) % | 92 | 100 | 101 | 97 | 97 | 96 | 95 | 100 | 100 |

TABLE 44
Field data for Construct 8. Numbers shown in bold are significantly different from the control
at the p-value shown. bu/a is bushels per acre. “All” indicates the average across all events
or testers. (T/C) % is the value for the transgenic hybrid combination (T) expressed as a percent of
the control (C). T − C is the transgenic hybrid combination minus the control. Oil, protein, and
amino acid content are shown as percent of seed dry weight.

| | | Yield | Oil | Prot | Arg | Cys | Lys | Met | Thr | Val |
|---|---|---|---|---|---|---|---|---|---|---|
| | | (bu/a) | (%) | (%) | (%) | (%) | (%) | (%) | (%) | (%) |
| Event | Description | p <= 0.10 | p <= 0.15 | p <= 0.15 | p <= 0.15 | p <= 0.15 | p <= 0.15 | p <= 0.15 | p <= 0.15 | p <= 0.15 |
| All | Construct (T) | 141.2 | 4.7 | 9.0 | 0.291 | 0.138 | 0.299 | 0.166 | 0.290 | 0.430 |
| All | Control (C) | 143.8 | 4.7 | 8.8 | 0.289 | 0.143 | 0.299 | 0.180 | 0.286 | 0.421 |
| All | T − C | −2.6 | 0.0 | 0.2 | 0.002 | −0.005 | 0.000 | −0.014 | 0.004 | 0.009 |
| All | (T/C) % | 98 | 100 | 102 | 101 | 97 | 100 | 92 | 101 | 102 |
| All | p-value | 0.73 | 0.67 | 0.27 | 0.84 | 0.47 | 0.97 | 0.11 | 0.52 | 0.33 |
| 8X1 | Event (T) | 133.2 | 4.7 | 9.1 | 0.292 | 0.131 | 0.301 | 0.162 | 0.290 | 0.431 |
| 8X1 | Control (C) | 143.8 | 4.7 | 8.8 | 0.289 | 0.143 | 0.299 | 0.180 | 0.286 | 0.421 |
| 8X1 | T − C | −10.6 | 0.0 | 0.3 | 0.003 | −0.012 | 0.002 | −0.018 | 0.004 | 0.010 |
| 8X1 | (T/C) % | 93 | 100 | 103 | 101 | 92 | 101 | 90 | 101 | 102 |
| 8X1 | p-value | 0.34 | 0.88 | 0.26 | 0.85 | 0.18 | 0.88 | 0.22 | 0.64 | 0.44 |
| 8Y1 | Event (T) | 139.6 | 4.7 | 8.9 | 0.302 | 0.140 | 0.309 | 0.160 | 0.290 | 0.428 |
| 8Y1 | Control (C) | 143.8 | 4.8 | 8.6 | 0.282 | 0.137 | 0.296 | 0.170 | 0.283 | 0.414 |
| 8Y1 | T − C | −4.2 | −0.1 | 0.3 | 0.020 | 0.003 | 0.013 | −0.010 | 0.007 | 0.014 |
| 8Y1 | (T/C) % | 97 | 98 | 103 | 107 | 102 | 104 | 94 | 102 | 103 |
| 8Y1 | p-value | 0.69 | 0.34 | 0.11 | 0.17 | 0.80 | 0.44 | 0.48 | 0.51 | 0.36 |
| 8Z1 | Event (T) | 150.5 | 4.6 | 9.0 | 0.281 | 0.132 | 0.285 | 0.171 | 0.286 | 0.421 |
| 8Z1 | Control (C) | 143.8 | 4.7 | 8.8 | 0.289 | 0.143 | 0.299 | 0.180 | 0.286 | 0.421 |
| 8Z1 | T − C | 6.7 | −0.1 | 0.2 | −0.008 | −0.011 | −0.014 | −0.009 | 0.000 | 0.000 |
| 8Z1 | (T/C) % | 105 | 98 | 102 | 97 | 92 | 95 | 95 | 100 | 100 |
| 8Z1 | p-value | 0.54 | 0.46 | 0.53 | 0.58 | 0.25 | 0.32 | 0.55 | 0.99 | 0.97 |
| 8A2 | Event (T) | 152.6 | 4.6 | 9.1 | 0.294 | 0.137 | 0.304 | 0.165 | 0.291 | 0.433 |
| 8A2 | Control (C) | 143.8 | 4.7 | 8.8 | 0.289 | 0.143 | 0.299 | 0.180 | 0.286 | 0.421 |
| 8A2 | T − C | 8.8 | −0.1 | 0.3 | 0.005 | −0.006 | 0.005 | −0.015 | 0.005 | 0.012 |
| 8A2 | (T/C) % | 106 | 98 | 103 | 102 | 96 | 102 | 92 | 102 | 103 |
| 8A2 | p-value | 0.40 | 0.40 | 0.27 | 0.73 | 0.55 | 0.76 | 0.30 | 0.58 | 0.38 |
| 8B2 | Event (T) | 139.0 | 4.7 | 9.1 | 0.303 | 0.154 | 0.309 | 0.170 | 0.301 | 0.447 |
| 8B2 | Control (C) | 143.8 | 4.8 | 8.6 | 0.282 | 0.137 | 0.296 | 0.170 | 0.283 | 0.414 |
| 8B2 | T − C | −4.8 | −0.1 | 0.5 | 0.021 | 0.017 | 0.013 | 0.000 | 0.018 | 0.033 |
| 8B2 | (T/C) % | 97 | 98 | 106 | 107 | 112 | 104 | 100 | 106 | 108 |
| 8B2 | p-value | 0.65 | 0.50 | 0.06 | 0.24 | 0.22 | 0.51 | 0.99 | 0.11 | 0.07 |
| 8C2 | Event (T) | 132.6 | 4.7 | 8.9 | 0.280 | 0.138 | 0.288 | 0.171 | 0.285 | 0.423 |
| 8C2 | Control (C) | 143.8 | 4.7 | 8.8 | 0.289 | 0.143 | 0.299 | 0.180 | 0.286 | 0.421 |
| 8C2 | T − C | −11.2 | 0.0 | 0.1 | −0.009 | −0.005 | −0.011 | −0.009 | −0.001 | 0.002 |
| 8C2 | (T/C) % | 92 | 100 | 101 | 97 | 97 | 96 | 95 | 100 | 100 |
| 8C2 | p-value | 0.26 | 0.98 | 0.77 | 0.52 | 0.62 | 0.48 | 0.57 | 0.85 | 0.85 |

TABLE 45
Summary of field data for Construct 9. Numbers shown in bold are significantly different from the control
at the p-value shown. bu/a is bushels per acre. “All” indicates the average across all events or testers.
(T/C) % is the value for the transgenic hybrid combination (T) expressed as a percent of the control (C).

| | | Yield | Oil | Prot | Arg | Cys | Lys | Met | Thr | Val |
|---|---|---|---|---|---|---|---|---|---|---|
| | | (bu/a) | (%) | (%) | (%) | (%) | (%) | (%) | (%) | (%) |
| Event | Description | p <= 0.10 | p <= 0.15 | p <= 0.15 | p <= 0.15 | p <= 0.15 | p <= 0.15 | p <= 0.15 | p <= 0.15 | p <= 0.15 |
| All | (T/C) % | 101 | 98 | 100 | 102 | 102 | 103 | 104 | 101 | 101 |
| 9D2 | (T/C) % | 98 | 96 | 105 | 105 | 104 | 103 | 103 | 104 | 106 |
| 9E2 | (T/C) % | 101 | 98 | 99 | 102 | 99 | 108 | 104 | 102 | 102 |
| 9F2 | (T/C) % | 99 | 100 | 103 | 108 | 109 | 107 | 105 | 103 | 105 |
| 9G2 | (T/C) % | 97 | 98 | 97 | 100 | 103 | 101 | 110 | 96 | 97 |
| 9H2 | (T/C) % | 102 | 98 | 100 | 100 | 102 | 103 | 101 | 100 | 100 |
| 9I2 | (T/C) % | 104 | 98 | 97 | 94 | 95 | 97 | 101 | 98 | 97 |

TABLE 46
Field data for Construct 9. Numbers shown in bold are significantly different from the control
at the p-value shown. bu/a is bushels per acre. “All” indicates the average across all events
or testers. (T/C) % is the value for the transgenic hybrid combination (T) expressed as a percent of
the control (C). T − C is the transgenic hybrid combination minus the control. Oil, protein, and
amino acid content are shown as percent of seed dry weight.

| | | Yield | Oil | Prot | Arg | Cys | Lys | Met | Thr | Val |
|---|---|---|---|---|---|---|---|---|---|---|
| | | (bu/a) | (%) | (%) | (%) | (%) | (%) | (%) | (%) | (%) |
| Event | Description | p <= 0.10 | p <= 0.15 | p <= 0.15 | p <= 0.15 | p <= 0.15 | p <= 0.15 | p <= 0.15 | p <= 0.15 | p <= 0.15 |
| All | Construct (T) | 153.4 | 5.0 | 8.7 | 0.301 | 0.154 | 0.361 | 0.155 | 0.298 | 0.435 |
| All | Control (C) | 152.4 | 5.1 | 8.7 | 0.296 | 0.151 | 0.349 | 0.149 | 0.296 | 0.429 |
| All | T − C | 1.0 | −0.1 | 0.0 | 0.005 | 0.003 | 0.012 | 0.006 | 0.002 | 0.006 |
| All | (T/C) % | 101 | 98 | 100 | 102 | 102 | 103 | 104 | 101 | 101 |
| All | p-value | 0.88 | 0.53 | 0.88 | 0.61 | 0.56 | 0.21 | 0.28 | 0.75 | 0.63 |
| 9D2 | Event (T) | 149.3 | 4.8 | 9.2 | 0.314 | 0.159 | 0.362 | 0.154 | 0.312 | 0.460 |
| 9D2 | Control (C) | 152.4 | 5.0 | 8.8 | 0.299 | 0.153 | 0.350 | 0.149 | 0.299 | 0.435 |
| 9D2 | T − C | −3.1 | −0.2 | 0.4 | 0.015 | 0.006 | 0.012 | 0.005 | 0.013 | 0.025 |
| 9D2 | (T/C) % | 98 | 96 | 105 | 105 | 104 | 103 | 103 | 104 | 106 |
| 9D2 | p-value | 0.75 | 0.28 | 0.32 | 0.45 | 0.56 | 0.46 | 0.69 | 0.37 | 0.26 |
| 9E2 | Event (T) | 154.3 | 5.0 | 8.6 | 0.301 | 0.150 | 0.376 | 0.155 | 0.301 | 0.439 |
| 9E2 | Control (C) | 153.5 | 5.1 | 8.7 | 0.296 | 0.151 | 0.349 | 0.149 | 0.296 | 0.429 |
| 9E2 | T − C | 0.8 | −0.1 | −0.1 | 0.005 | −0.001 | 0.027 | 0.006 | 0.005 | 0.010 |
| 9E2 | (T/C) % | 101 | 98 | 99 | 102 | 99 | 108 | 104 | 102 | 102 |
| 9E2 | p-value | 0.93 | 0.79 | 0.89 | 0.74 | 0.84 | 0.07 | 0.46 | 0.65 | 0.61 |
| 9F2 | Event (T) | 152.2 | 5.1 | 9.0 | 0.320 | 0.164 | 0.372 | 0.156 | 0.305 | 0.450 |
| 9F2 | Control (C) | 153.5 | 5.1 | 8.7 | 0.296 | 0.151 | 0.349 | 0.149 | 0.296 | 0.429 |
| 9F2 | T − C | −1.3 | 0.0 | 0.3 | 0.024 | 0.013 | 0.023 | 0.007 | 0.009 | 0.021 |
| 9F2 | (T/C) % | 99 | 100 | 103 | 108 | 109 | 107 | 105 | 103 | 105 |
| 9F2 | p-value | 0.89 | 0.91 | 0.44 | 0.19 | 0.18 | 0.12 | 0.42 | 0.44 | 0.32 |
| 9G2 | Event (T) | 148.3 | 4.9 | 8.5 | 0.300 | 0.157 | 0.355 | 0.164 | 0.288 | 0.423 |
| 9G2 | Control (C) | 152.4 | 5.0 | 8.8 | 0.299 | 0.153 | 0.350 | 0.149 | 0.299 | 0.435 |
| 9G2 | T − C | −4.1 | −0.1 | −0.3 | 0.001 | 0.004 | 0.005 | 0.015 | −0.011 | −0.012 |
| 9G2 | (T/C) % | 97 | 98 | 97 | 100 | 103 | 101 | 110 | 96 | 97 |
| 9G2 | p-value | 0.68 | 0.70 | 0.49 | 0.95 | 0.69 | 0.75 | 0.20 | 0.39 | 0.55 |
| 9H2 | Event (T) | 157.1 | 5.1 | 8.6 | 0.290 | 0.152 | 0.357 | 0.150 | 0.293 | 0.424 |
| 9H2 | Control (C) | 153.5 | 5.2 | 8.6 | 0.289 | 0.149 | 0.348 | 0.149 | 0.293 | 0.422 |
| 9H2 | T − C | 3.6 | −0.1 | 0.0 | 0.001 | 0.003 | 0.009 | 0.001 | 0.000 | 0.002 |
| 9H2 | (T/C) % | 102 | 98 | 100 | 100 | 102 | 103 | 101 | 100 | 100 |
| 9H2 | p-value | 0.72 | 0.82 | 0.97 | 0.95 | 0.65 | 0.65 | 0.86 | 0.99 | 0.92 |
| 9I2 | Event (T) | 159.1 | 4.9 | 8.4 | 0.279 | 0.146 | 0.338 | 0.152 | 0.288 | 0.414 |
| 9I2 | Control (C) | 152.4 | 5.0 | 8.7 | 0.297 | 0.154 | 0.350 | 0.151 | 0.295 | 0.429 |
| 9I2 | T − C | 6.7 | −0.1 | −0.3 | −0.018 | −0.008 | −0.012 | 0.001 | −0.007 | −0.015 |
| 9I2 | (T/C) % | 104 | 98 | 97 | 94 | 95 | 97 | 101 | 98 | 97 |
| 9I2 | p-value | 0.46 | 0.93 | 0.36 | 0.28 | 0.38 | 0.47 | 0.93 | 0.59 | 0.38 |

TABLE 47
Summary of field data for Construct 10. Numbers shown in bold are significantly different from the control
at the p-value shown. bu/a is bushels per acre. “All” indicates the average across all events or testers.
(T/C) % is the value for the transgenic hybrid combination (T) expressed as a percent of the control (C).

| | | Yield | Oil | Prot | Arg | Cys | Lys | Met | Thr | Val |
|---|---|---|---|---|---|---|---|---|---|---|
| | | (bu/a) | (%) | (%) | (%) | (%) | (%) | (%) | (%) | (%) |
| Event | Description | p <= 0.10 | p <= 0.15 | p <= 0.15 | p <= 0.15 | p <= 0.15 | p <= 0.15 | p <= 0.15 | p <= 0.15 | p <= 0.15 |
| All | (T/C) % | 96 | 98 | 101 | 101 | 102 | 99 | 95 | 99 | 99 |
| 10J2 | (T/C) % | 91 | 96 | 98 | 99 | 99 | 100 | 95 | 98 | 98 |
| 10K2 | (T/C) % | 104 | 94 | 101 | 103 | 104 | 97 | 96 | 102 | 102 |
| 10L2 | (T/C) % | 98 | 98 | 101 | 102 | 103 | 99 | 96 | 101 | 100 |
| 10M2 | (T/C) % | 94 | 102 | 100 | 97 | 98 | 95 | 91 | 96 | 95 |
| 10N2 | (T/C) % | 92 | 100 | 102 | 103 | 104 | 103 | 97 | 100 | 100 |

TABLE 48
Field data for Construct 10. Numbers shown in bold are significantly different from the control at the p-value shown.
bu/a is bushels per acre. “All” indicates the average across all events or testers. (T/C) % is the value for the transgenic
hybrid combination (T) expressed as a percent of the control (C). T − C is the transgenic hybrid combination minus the control.
Oil, protein, and amino acid content are shown as percent of seed dry weight.

| | | Yield | Oil | Prot | Arg | Cys | Lys | Met | Thr | Val |
|---|---|---|---|---|---|---|---|---|---|---|
| | | (bu/a) | (%) | (%) | (%) | (%) | (%) | (%) | (%) | (%) |
| Event | Description | p <= 0.10 | p <= 0.15 | p <= 0.15 | p <= 0.15 | p <= 0.15 | p <= 0.15 | p <= 0.15 | p <= 0.15 | p <= 0.15 |
| All | Construct (T) | 143.0 | 4.8 | 8.6 | 0.284 | 0.149 | 0.340 | 0.139 | 0.279 | 0.412 |
| All | Control (C) | 148.2 | 4.9 | 8.5 | 0.282 | 0.146 | 0.344 | 0.146 | 0.281 | 0.416 |
| All | T − C | −5.2 | −0.1 | 0.1 | 0.002 | 0.003 | −0.004 | −0.007 | −0.002 | −0.004 |
| All | (T/C) % | 96 | 98 | 101 | 101 | 102 | 99 | 95 | 99 | 99 |
| All | p-value | 0.43 | 0.69 | 0.86 | 0.80 | 0.54 | 0.65 | 0.17 | 0.75 | 0.64 |
| 10J2 | Event (T) | 135.0 | 4.7 | 8.3 | 0.280 | 0.145 | 0.343 | 0.139 | 0.275 | 0.409 |
| 10J2 | Control (C) | 148.2 | 4.9 | 8.5 | 0.282 | 0.146 | 0.344 | 0.146 | 0.281 | 0.416 |
| 10J2 | T − C | −13.2 | −0.2 | −0.2 | −0.002 | −0.001 | −0.001 | −0.007 | −0.006 | −0.007 |
| 10J2 | (T/C) % | 91 | 96 | 98 | 99 | 99 | 100 | 95 | 98 | 98 |
| 10J2 | p-value | 0.18 | 0.60 | 0.61 | 0.81 | 0.99 | 0.92 | 0.37 | 0.31 | 0.49 |
| 10K2 | Event (T) | 154.2 | 4.6 | 8.6 | 0.291 | 0.152 | 0.332 | 0.140 | 0.286 | 0.426 |
| 10K2 | Control (C) | 148.2 | 4.9 | 8.5 | 0.282 | 0.146 | 0.344 | 0.146 | 0.281 | 0.416 |
| 10K2 | T − C | 6.0 | −0.3 | 0.1 | 0.009 | 0.006 | −0.012 | −0.006 | 0.005 | 0.010 |
| 10K2 | (T/C) % | 104 | 94 | 101 | 103 | 104 | 97 | 96 | 102 | 102 |
| 10K2 | p-value | 0.55 | 0.34 | 0.71 | 0.45 | 0.42 | 0.46 | 0.50 | 0.48 | 0.44 |
| 10L2 | Event (T) | 145.7 | 4.7 | 8.6 | 0.287 | 0.151 | 0.339 | 0.142 | 0.285 | 0.417 |
| 10L2 | Control (C) | 148.2 | 4.8 | 8.5 | 0.282 | 0.146 | 0.344 | 0.148 | 0.281 | 0.416 |
| 10L2 | T − C | −2.5 | −0.1 | 0.1 | 0.005 | 0.005 | −0.005 | −0.006 | 0.004 | 0.001 |
| 10L2 | (T/C) % | 98 | 98 | 101 | 102 | 103 | 99 | 96 | 101 | 100 |
| 10L2 | p-value | 0.80 | 0.78 | 0.83 | 0.70 | 0.58 | 0.78 | 0.54 | 0.72 | 0.96 |
| 10M2 | Event (T) | 138.8 | 5.0 | 8.5 | 0.273 | 0.143 | 0.328 | 0.133 | 0.269 | 0.394 |
| 10M2 | Control (C) | 148.2 | 4.9 | 8.5 | 0.282 | 0.146 | 0.344 | 0.146 | 0.281 | 0.416 |
| 10M2 | T − C | −9.4 | 0.1 | 0.0 | −0.009 | −0.003 | −0.016 | −0.013 | −0.012 | −0.022 |
| 10M2 | (T/C) % | 94 | 102 | 100 | 97 | 98 | 95 | 91 | 96 | 95 |
| 10M2 | p-value | 0.34 | 0.72 | 0.99 | 0.27 | 0.68 | 0.26 | 0.11 | 0.03 | 0.02 |
| 10N2 | Event (T) | 140.7 | 4.9 | 8.7 | 0.290 | 0.152 | 0.356 | 0.142 | 0.282 | 0.415 |
| 10N2 | Control (C) | 153.3 | 4.9 | 8.5 | 0.282 | 0.146 | 0.344 | 0.146 | 0.281 | 0.416 |
| 10N2 | T − C | −12.6 | 0.0 | 0.2 | 0.008 | 0.006 | 0.012 | −0.004 | 0.001 | −0.001 |
| 10N2 | (T/C) % | 92 | 100 | 102 | 103 | 104 | 103 | 97 | 100 | 100 |
| 10N2 | p-value | 0.17 | 0.88 | 0.53 | 0.39 | 0.33 | 0.41 | 0.63 | 0.82 | 0.93 |

TABLE 49
Summary of field data for Construct 39. Numbers shown in bold are significantly different
from the control at the p-value shown. bu/a is bushels per acre. All events are an average of two testers,
except event 13S2 which had one tester. “All” indicates the average across all events or testers.
(T/C) % is the value for the transgenic hybrid combination (T) expressed as a percent of the control (C).

| | | Yield | Oil | Prot | Arg | Cys | Ile | Lys | Met | Thr | Val |
|---|---|---|---|---|---|---|---|---|---|---|---|
| | Des- | (bu/a) | (%) | (%) | (%) | (%) | (%) | (%) | (%) | (%) | (%) |
| Event | cription | p <= 0.10 | p <= 0.15 | p <= 0.15 | p <= 0.15 | p <= 0.15 | p <= 0.05 | p <= 0.15 | p <= 0.15 | p <= 0.15 | p <= 0.15 |
| All | (T/C) % | 100 | 103 | 106 | 107 | 102 | 101 | 110 | 102 | 103 | 104 |
| 39O2 | (T/C) % | 97 | 103 | 107 | 106 | 98 | 98 | 111 | 100 | 101 | 103 |
| 39P2 | (T/C) % | 99 | 103 | 103 | 104 | 100 | 101 | 108 | 101 | 102 | 103 |
| 39Q2 | (T/C) % | 105 | 103 | 102 | 102 | 98 | 102 | 102 | 101 | 101 | 103 |
| 39R2 | (T/C) % | 96 | 103 | 110 | 115 | 109 | 105 | 117 | 105 | 106 | 110 |
| 39S2 | (T/C) % | 111 | 97 | 106 | 108 | 105 | 99 | 113 | 102 | 102 | 103 |

TABLE 50
Field data for Construct 39. Numbers shown in bold are significantly different from the control at the p-value shown.
bu/a is bushels per acre. “All” indicates the average across all events or testers. (T/C) % is the value for the transgenic
hybrid combination (T) expressed as a percent of the control (C). T − C is the transgenic hybrid combination minus the control.
Oil, protein, and amino acid content are shown as percent of seed dry weight.

| | | Yield | Oil | Prot | Arg | Cys | Ile | Lys | Met | Thr | Val |
|---|---|---|---|---|---|---|---|---|---|---|---|
| | | (bu/a) | (%) | (%) | (%) | (%) | (%) | (%) | (%) | (%) | (%) |
| Event | Description | p <= 0.10 | p <= 0.15 | p <= 0.15 | p <= 0.15 | p <= 0.15 | p <= 0.05 | p <= 0.15 | p <= 0.15 | p <= 0.15 | p <= 0.15 |
| All | Construct (T) | 173.2 | 3.6 | 10.8 | 0.481 | 0.233 | 0.387 | 0.363 | 0.246 | 0.474 | 0.569 |
| All | Control (C) | 172.5 | 3.5 | 10.2 | 0.449 | 0.229 | 0.383 | 0.329 | 0.242 | 0.462 | 0.545 |
| All | T − C | 0.7 | 0.1 | 0.6 | 0.032 | 0.004 | 0.004 | 0.034 | 0.004 | 0.012 | 0.024 |
| All | (T/C) % | 100 | 103 | 106 | 107 | 102 | 101 | 110 | 102 | 103 | 104 |
| All | p-value | 0.91 | 0.15 | 0.01 | 0.01 | 0.60 | 0.66 | 0.00 | 0.48 | 0.12 | 0.03 |
| 39O2 | Event (T) | 167.4 | 3.6 | 10.9 | 0.473 | 0.223 | 0.373 | 0.366 | 0.237 | 0.466 | 0.557 |
| 39O2 | Control (C) | 172.3 | 3.5 | 10.2 | 0.447 | 0.228 | 0.382 | 0.329 | 0.238 | 0.461 | 0.543 |
| 39O2 | T − C | −4.9 | 0.1 | 0.7 | 0.026 | −0.005 | −0.009 | 0.037 | −0.001 | 0.005 | 0.014 |
| 39O2 | (T/C) % | 97 | 103 | 107 | 106 | 98 | 98 | 111 | 100 | 101 | 103 |
| 39O2 | p-value | 0.59 | 0.09 | 0.01 | 0.04 | 0.60 | 0.40 | 0.00 | 0.89 | 0.61 | 0.29 |
| 39P2 | Event (T) | 171.4 | 3.6 | 10.5 | 0.467 | 0.229 | 0.384 | 0.356 | 0.245 | 0.472 | 0.557 |
| 39P2 | Control (C) | 172.5 | 3.5 | 10.2 | 0.450 | 0.228 | 0.382 | 0.329 | 0.242 | 0.463 | 0.543 |
| 39P2 | T − C | −1.1 | 0.1 | 0.3 | 0.017 | 0.001 | 0.002 | 0.027 | 0.003 | 0.009 | 0.014 |
| 39P2 | (T/C) % | 99 | 103 | 103 | 104 | 100 | 101 | 108 | 101 | 102 | 103 |
| 39P2 | p-value | 0.90 | 0.06 | 0.19 | 0.17 | 0.90 | 0.81 | 0.03 | 0.67 | 0.32 | 0.25 |
| 39Q2 | Event (T) | 180.4 | 3.6 | 10.3 | 0.454 | 0.223 | 0.388 | 0.338 | 0.242 | 0.464 | 0.557 |
| 39Q2 | Control (C) | 172.3 | 3.5 | 10.1 | 0.445 | 0.227 | 0.379 | 0.331 | 0.240 | 0.460 | 0.541 |
| 39Q2 | T − C | 8.1 | 0.1 | 0.2 | 0.009 | −0.004 | 0.009 | 0.007 | 0.002 | 0.004 | 0.016 |
| 39Q2 | (T/C) % | 105 | 103 | 102 | 102 | 98 | 102 | 102 | 101 | 101 | 103 |
| 39Q2 | p-value | 0.40 | 0.03 | 0.56 | 0.54 | 0.65 | 0.47 | 0.60 | 0.86 | 0.70 | 0.27 |
| 39R2 | Event (T) | 165.7 | 3.6 | 11.2 | 0.516 | 0.251 | 0.400 | 0.385 | 0.255 | 0.490 | 0.600 |
| 39R2 | Control (C) | 172.4 | 3.5 | 10.2 | 0.449 | 0.230 | 0.381 | 0.328 | 0.242 | 0.462 | 0.543 |
| 39R2 | T − C | −6.7 | 0.1 | 1.0 | 0.067 | 0.021 | 0.019 | 0.057 | 0.013 | 0.028 | 0.057 |
| 39R2 | (T/C) % | 96 | 103 | 110 | 115 | 109 | 105 | 117 | 105 | 106 | 110 |
| 39R2 | p-value | 0.46 | 0.43 | 0.00 | 0.00 | 0.02 | 0.09 | 0.00 | 0.15 | 0.00 | 0.00 |
| 39S2 | Event (T) | 184.2 | 3.7 | 10.9 | 0.511 | 0.247 | 0.386 | 0.386 | 0.251 | 0.494 | 0.570 |
| 39S2 | Control (C) | 165.5 | 3.8 | 10.3 | 0.473 | 0.235 | 0.388 | 0.343 | 0.245 | 0.485 | 0.552 |
| 39S2 | T − C | 18.7 | −0.1 | 0.6 | 0.038 | 0.012 | −0.002 | 0.043 | 0.006 | 0.009 | 0.018 |
| 39S2 | (T/C) % | 111 | 97 | 106 | 108 | 105 | 99 | 113 | 102 | 102 | 103 |
| 39S2 | p-value | 0.08 | 0.03 | 0.22 | 0.10 | 0.44 | 0.89 | 0.03 | 0.65 | 0.52 | 0.42 |

TABLE 51
Summary of field data for Construct 11. Numbers shown in bold are significantly different from the control at the
p-value shown. bu/a is bushels per acre. “All” indicates analysis across all events. (T/C) % is the value
for the transgenic hybrid combination (T) expressed as a percent of the control (C).

| | | Yield | Oil | Protein | Arg | Cys | Lys | Met | Thr | Val |
|---|---|---|---|---|---|---|---|---|---|---|
| | | (bu/a) | (%) | (%) | (%) | (%) | (%) | (%) | (%) | (%) |
| Event | Desc. | p < 0.1 | p < 0.05 | p < 0.05 | p < 0.05 | p < 0.05 | p < 0.05 | p < 0.05 | p < 0.05 | p < 0.05 |
| All | (T/C) % | 105 | 108 | 110 | 110 | 114 | 106 | 110 | 108 | 108 |
| 11A | (T/C) % | 101 | 107 | 111 | 109 | 111 | 106 | 110 | 108 | 108 |
| 11B | (T/C) % | 108 | 112 | 108 | 108 | 112 | 104 | 110 | 106 | 105 |
| 11C | (T/C) % | 102 | 109 | 112 | 114 | 121 | 105 | 116 | 111 | 111 |
| 11D | (T/C) % | 103 | 105 | 109 | 108 | 109 | 107 | 105 | 107 | 107 |

TABLE 52
Field data for Construct 11. Numbers shown in bold are significantly different from the control at the p value shown.
bu/a is bushels per acre. “All” indicates analysis across all events. (T/C) % is the value for the transgenic hybrid combination (T)
expressed as a percent of the control (C). T − C is the transgenic hybrid combination minus the control.
Oil, protein, and amino acid content are shown as percent of seed dry weight.

| | | Yield | Oil | Protein | Arg | Cys | Lys | Met | Thr | Val |
|---|---|---|---|---|---|---|---|---|---|---|
| | | (bu/a) | (%) | (%) | (%) | (%) | (%) | (%) | (%) | (%) |
| Event | Description | p < 0.1 | p < 0.05 | p < 0.05 | p < 0.05 | p < 0.05 | p < 0.05 | p < 0.05 | p < 0.05 | p < 0.05 |
| All | Construct (T) | 173.2 | 5.7 | 10.7 | 0.355 | 0.198 | 0.356 | 0.197 | 0.339 | 0.506 |
| All | Control (C) | 165.7 | 5.3 | 9.7 | 0.323 | 0.174 | 0.337 | 0.178 | 0.312 | 0.469 |
| All | T − C | 7.6 | 0.4 | 1.0 | 0.032 | 0.024 | 0.020 | 0.018 | 0.026 | 0.037 |
| All | (T/C) % | 105 | 108 | 110 | 110 | 114 | 106 | 110 | 108 | 108 |
| All | p-value | 0.03 | 0.00 | 0.00 | 0.00 | 0.00 | 0.01 | 0.00 | 0.00 | 0.00 |
| 11A | Event (T) | 167.9 | 5.7 | 10.8 | 0.356 | 0.195 | 0.358 | 0.197 | 0.342 | 0.512 |
| 11A | Control (C) | 167.0 | 5.3 | 9.8 | 0.326 | 0.175 | 0.337 | 0.179 | 0.316 | 0.473 |
| 11A | T − C | 0.9 | 0.4 | 1.1 | 0.030 | 0.019 | 0.021 | 0.018 | 0.026 | 0.039 |
| 11A | (T/C) % | 101 | 107 | 111 | 109 | 111 | 106 | 110 | 108 | 108 |
| 11A | p-value | 0.91 | 0.00 | 0.00 | 0.01 | 0.02 | 0.05 | 0.01 | 0.00 | 0.00 |
| 11B | Event (T) | 179.7 | 5.9 | 10.5 | 0.349 | 0.197 | 0.349 | 0.197 | 0.334 | 0.495 |
| 11B | Control (C) | 166.6 | 5.3 | 9.7 | 0.324 | 0.175 | 0.336 | 0.179 | 0.314 | 0.471 |
| 11B | T − C | 13.1 | 0.6 | 0.7 | 0.025 | 0.022 | 0.013 | 0.018 | 0.020 | 0.024 |
| 11B | (T/C) % | 108 | 112 | 108 | 108 | 112 | 104 | 110 | 106 | 105 |
| 11B | p-value | 0.01 | 0.00 | 0.00 | 0.03 | 0.01 | 0.22 | 0.01 | 0.01 | 0.04 |
| 11C | Event (T) | 169.6 | 5.7 | 10.9 | 0.369 | 0.211 | 0.354 | 0.207 | 0.346 | 0.518 |
| 11C | Control (C) | 166.8 | 5.3 | 9.7 | 0.322 | 0.174 | 0.336 | 0.178 | 0.312 | 0.468 |
| 11C | T − C | 2.9 | 0.5 | 1.2 | 0.046 | 0.037 | 0.018 | 0.029 | 0.034 | 0.050 |
| 11C | (T/C) % | 102 | 109 | 112 | 114 | 121 | 105 | 116 | 111 | 111 |
| 11C | p-value | 0.70 | 0.00 | 0.00 | 0.00 | 0.00 | 0.09 | 0.00 | 0.00 | 0.00 |
| 11D | Event (T) | 170.5 | 5.5 | 10.6 | 0.348 | 0.190 | 0.362 | 0.186 | 0.334 | 0.500 |
| 11D | Control (C) | 166.3 | 5.3 | 9.7 | 0.323 | 0.174 | 0.337 | 0.178 | 0.314 | 0.470 |
| 11D | T − C | 4.2 | 0.3 | 0.9 | 0.025 | 0.016 | 0.025 | 0.008 | 0.021 | 0.031 |
| 11D | (T/C) % | 103 | 105 | 109 | 108 | 109 | 107 | 105 | 107 | 107 |
| 11D | p-value | 0.41 | 0.01 | 0.00 | 0.01 | 0.03 | 0.01 | 0.16 | 0.00 | 0.00 |

TABLE 53
Summary of field data for Construct 11 by year. Numbers shown in bold are significantly different
from the control at the p-value shown. bu/a is bushels per acre. “All” indicates analysis across both years.
(T/C) % is the value for the transgenic hybrid combination (T) expressed as a percent of the control (C).

| | | Yield | Oil | Protein | Arg | Cys | Lys | Met | Thr | Val |
|---|---|---|---|---|---|---|---|---|---|---|
| | | (bu/a) | (%) | (%) | (%) | (%) | (%) | (%) | (%) | (%) |
| Year | Description | p < 0.1 | p < 0.05 | p < 0.05 | p < 0.05 | p < 0.05 | p < 0.05 | p < 0.05 | p < 0.05 | p < 0.05 |
| All | (T/C) % | 95 | 107 | 112 | 109 | 113 | 104 | 112 | 110 | 111 |
| 1 | (T/C) % | 97 | 104 | 111 | 108 | 110 | 101 | 108 | 109 | 110 |
| 2 | (T/C) % | 99 | 105 | 115 | 110 | 112 | 106 | 111 | 107 | 108 |

TABLE 54
Field data for Construct 11 by year. Numbers shown in bold are significantly different from the control at the p-value shown.
bu/a is bushels per acre. “All” indicates analysis across all events or both years. (T/C) % is the value for the transgenic hybrid
combination (T) expressed as a percent of the control (C). T − C is the transgenic hybrid combination minus the control.
Oil, protein, and amino acid content are shown as percent of seed dry weight.

| | | | Yield | Oil | Protein | Arg | Cys | Lys | Met | Thr | Val |
|---|---|---|---|---|---|---|---|---|---|---|---|
| | | | (bu/a) | (%) | (%) | (%) | (%) | (%) | (%) | (%) | (%) |
| Event | Year | Description | p < 0.1 | p < 0.05 | p < 0.05 | p < 0.05 | p < 0.05 | p < 0.05 | p < 0.05 | p < 0.05 | p < 0.05 |
| All | All | Construct (T) | 184.3 | 4.8 | 10.6 | 0.339 | 0.185 | 0.325 | 0.183 | 0.323 | 0.500 |
| All | All | Control (C) | 193.7 | 4.5 | 9.4 | 0.310 | 0.163 | 0.313 | 0.164 | 0.293 | 0.450 |
| All | All | T − C | −9.4 | 0.3 | 1.2 | 0.029 | 0.022 | 0.012 | 0.019 | 0.030 | 0.050 |
| All | All | (T/C) % | 95 | 107 | 112 | 109 | 113 | 104 | 112 | 110 | 111 |
| All | All | p-value | 0.01 | 0.00 | 0.00 | 0.00 | 0.00 | 0.08 | 0.00 | 0.00 | 0.00 |
| All | 1 | Construct (T) | 192.8 | 4.6 | 10.6 | 0.343 | 0.183 | 0.318 | 0.177 | 0.313 | 0.498 |
| All | 1 | Control (C) | 198.7 | 4.4 | 9.6 | 0.317 | 0.166 | 0.314 | 0.164 | 0.288 | 0.452 |
| All | 1 | T − C | −5.9 | 0.2 | 1.0 | 0.026 | 0.017 | 0.003 | 0.013 | 0.025 | 0.045 |
| All | 1 | (T/C) % | 97 | 104 | 111 | 108 | 110 | 101 | 108 | 109 | 110 |
| All | 1 | p-value | 0.03 | 0.01 | 0.00 | 0.00 | 0.02 | 0.62 | 0.00 | 0.00 | 0.00 |
| All | 2 | Construct (T) | 177.7 | 5.1 | 10.8 | 0.337 | 0.193 | 0.337 | 0.200 | 0.338 | 0.508 |
| All | 2 | Control (C) | 179.6 | 4.9 | 9.4 | 0.306 | 0.173 | 0.318 | 0.181 | 0.315 | 0.470 |
| All | 2 | T − C | −1.9 | 0.2 | 1.4 | 0.031 | 0.021 | 0.019 | 0.020 | 0.023 | 0.038 |
| All | 2 | (T/C) % | 99 | 105 | 115 | 110 | 112 | 106 | 111 | 107 | 108 |
| All | 2 | p-value | 0.69 | 0.00 | 0.00 | 0.04 | 0.05 | 0.11 | 0.05 | 0.03 | 0.05 |
| 11A | 1 | Event (T) | 196.7 | 4.6 | 10.5 | 0.338 | 0.169 | 0.323 | 0.174 | 0.311 | 0.493 |
| 11A | 1 | Control (C) | 198.7 | 4.4 | 9.6 | 0.318 | 0.167 | 0.316 | 0.164 | 0.288 | 0.452 |
| 11A | 1 | T − C | −2.0 | 0.3 | 0.9 | 0.020 | 0.003 | 0.007 | 0.010 | 0.023 | 0.041 |
| 11A | 1 | (T/C) % | 99 | 106 | 110 | 106 | 102 | 102 | 106 | 108 | 109 |
| 11A | 1 | p-value | 0.65 | 0.03 | 0.00 | 0.11 | 0.80 | 0.55 | 0.09 | 0.01 | 0.00 |
| 11B | ALL | Event (T) | 186.9 | 4.8 | 10.5 | 0.339 | 0.183 | 0.320 | 0.183 | 0.327 | 0.505 |
| 11B | ALL | Control (C) | 194.5 | 4.5 | 9.4 | 0.309 | 0.163 | 0.313 | 0.164 | 0.293 | 0.450 |
| 11B | ALL | T − C | −7.6 | 0.3 | 1.1 | 0.030 | 0.020 | 0.007 | 0.019 | 0.034 | 0.055 |
| 11B | ALL | (T/C) % | 96 | 107 | 112 | 110 | 112 | 102 | 112 | 112 | 112 |
| 11B | ALL | p-value | 0.11 | 0.01 | 0.00 | 0.01 | 0.02 | 0.44 | 0.00 | 0.00 | 0.00 |
| 11B | 1 | Event (T) | 189.5 | 4.5 | 10.4 | 0.341 | 0.187 | 0.310 | 0.176 | 0.317 | 0.503 |
| 11B | 1 | Control (C) | 198.7 | 4.4 | 9.5 | 0.317 | 0.165 | 0.315 | 0.164 | 0.288 | 0.452 |
| 11B | 1 | T − C | −9.2 | 0.1 | 0.9 | 0.024 | 0.022 | −0.004 | 0.012 | 0.029 | 0.052 |
| 11B | 1 | (T/C) % | 95 | 103 | 109 | 108 | 113 | 99 | 107 | 110 | 111 |
| 11B | 1 | p-value | 0.04 | 0.32 | 0.00 | 0.05 | 0.04 | 0.70 | 0.04 | 0.00 | 0.00 |
| 11B | 2 | Event (T) | 183.9 | 5.2 | 10.8 | 0.348 | 0.188 | 0.338 | 0.201 | 0.344 | 0.520 |
| 11B | 2 | Control (C) | 180.0 | 4.9 | 9.5 | 0.311 | 0.175 | 0.317 | 0.183 | 0.319 | 0.477 |
| 11B | 2 | T − C | 3.8 | 0.3 | 1.4 | 0.037 | 0.013 | 0.021 | 0.018 | 0.025 | 0.043 |
| 11B | 2 | (T/C) % | 102 | 107 | 115 | 112 | 107 | 107 | 110 | 108 | 109 |
| 11B | 2 | p-value | 0.51 | 0.00 | 0.00 | 0.02 | 0.23 | 0.16 | 0.09 | 0.04 | 0.05 |
| 11C | ALL | Event (T) | 182.8 | 4.8 | 10.7 | 0.344 | 0.192 | 0.326 | 0.190 | 0.325 | 0.503 |
| 11C | ALL | Control (C) | 192.7 | 4.5 | 9.4 | 0.310 | 0.163 | 0.314 | 0.164 | 0.293 | 0.451 |
| 11C | ALL | T − C | −9.9 | 0.3 | 1.3 | 0.034 | 0.029 | 0.012 | 0.026 | 0.032 | 0.052 |
| 11C | ALL | (T/C) % | 95 | 107 | 114 | 111 | 118 | 104 | 116 | 111 | 112 |
| 11C | ALL | p-value | 0.09 | 0.00 | 0.00 | 0.00 | 0.00 | 0.14 | 0.00 | 0.00 | 0.00 |
| 11C | 1 | Event (T) | 194.9 | 4.5 | 10.7 | 0.360 | 0.186 | 0.331 | 0.178 | 0.315 | 0.508 |
| 11C | 1 | Control (C) | 198.7 | 4.4 | 9.5 | 0.318 | 0.166 | 0.316 | 0.164 | 0.288 | 0.452 |
| 11C | 1 | T − C | −3.8 | 0.2 | 1.2 | 0.042 | 0.020 | 0.015 | 0.014 | 0.027 | 0.056 |
| 11C | 1 | (T/C) % | 98 | 104 | 112 | 113 | 112 | 105 | 108 | 109 | 112 |
| 11C | 1 | p-value | 0.37 | 0.16 | 0.00 | 0.00 | 0.06 | 0.13 | 0.01 | 0.00 | 0.00 |
| 11C | 2 | Event (T) | 176.3 | 5.2 | 10.9 | 0.332 | 0.209 | 0.324 | 0.214 | 0.339 | 0.505 |
| 11C | 2 | Control (C) | 180.4 | 4.9 | 9.3 | 0.303 | 0.171 | 0.317 | 0.179 | 0.314 | 0.468 |
| 11C | 2 | T − C | −4.1 | 0.3 | 1.6 | 0.029 | 0.037 | 0.007 | 0.035 | 0.026 | 0.038 |
| 11C | 2 | (T/C) % | 98 | 106 | 117 | 109 | 122 | 102 | 119 | 108 | 108 |
| 11C | 2 | p-value | 0.68 | 0.00 | 0.00 | 0.18 | 0.02 | 0.65 | 0.02 | 0.10 | 0.19 |
| 11D | ALL | Event (T) | 182.1 | 4.7 | 10.6 | 0.332 | 0.179 | 0.327 | 0.176 | 0.318 | 0.491 |
| 11D | ALL | Control (C) | 194.3 | 4.5 | 9.4 | 0.310 | 0.163 | 0.314 | 0.164 | 0.293 | 0.450 |
| 11D | ALL | T − C | −12.2 | 0.2 | 1.2 | 0.022 | 0.016 | 0.013 | 0.012 | 0.025 | 0.041 |
| 11D | ALL | (T/C) % | 94 | 104 | 112 | 107 | 110 | 104 | 107 | 109 | 109 |
| 11D | ALL | p-value | 0.02 | 0.02 | 0.00 | 0.06 | 0.08 | 0.16 | 0.08 | 0.00 | 0.01 |
| 11D | 1 | Event (T) | 190.2 | 4.6 | 10.6 | 0.336 | 0.188 | 0.313 | 0.180 | 0.307 | 0.485 |
| 11D | 1 | Control (C) | 198.7 | 4.4 | 9.5 | 0.318 | 0.166 | 0.316 | 0.164 | 0.288 | 0.452 |
| 11D | 1 | T − C | −8.5 | 0.2 | 1.1 | 0.019 | 0.022 | −0.003 | 0.016 | 0.019 | 0.033 |
| 11D | 1 | (T/C) % | 96 | 105 | 112 | 106 | 113 | 99 | 110 | 107 | 107 |
| 11D | 1 | p-value | 0.06 | 0.09 | 0.00 | 0.12 | 0.04 | 0.79 | 0.01 | 0.02 | 0.01 |
| 11D | 2 | Event (T) | 172.6 | 5.0 | 11.0 | 0.331 | 0.181 | 0.340 | 0.193 | 0.334 | 0.504 |
| 11D | 2 | Control (C) | 180.2 | 4.9 | 9.6 | 0.307 | 0.173 | 0.311 | 0.185 | 0.318 | 0.477 |
| 11D | 2 | T − C | −7.6 | 0.1 | 1.4 | 0.024 | 0.008 | 0.028 | 0.008 | 0.016 | 0.027 |
| 11D | 2 | (T/C) % | 96 | 103 | 115 | 108 | 105 | 109 | 104 | 105 | 106 |
| 11D | 2 | p-value | 0.20 | 0.09 | 0.01 | 0.24 | 0.53 | 0.10 | 0.57 | 0.28 | 0.31 |

TABLE 55
Summary of field data for Construct 12. Numbers shown in bold are significantly different from the
control at the p value shown. bu/a is bushels per acre. “All” indicates analysis across all events.
(T/C) % is the value for the transgenic hybrid combination (T) expressed as a percent of the control (C).

| | | Yield | Oil | Prot | Arg | Cys | Lys | Met | Thr | Val |
|---|---|---|---|---|---|---|---|---|---|---|
| | | (bu/a) | (%) | (%) | (%) | (%) | (%) | (%) | (%) | (%) |
| Event | Desc. | p ≦ 0.10 | p ≦ 0.15 | p ≦ 0.15 | p ≦ 0.15 | p ≦ 0.15 | p ≦ 0.15 | p ≦ 0.15 | p ≦ 0.15 | p ≦ 0.15 |
| All | (T/C) % | 95 | 104 | 102 | 100 | 100 | 99 | 101 | 100 | 100 |
| 12E | (T/C) % | 81 | n/a | n/a | n/a | n/a | n/a | n/a | n/a | n/a |
| 12F | (T/C) % | 79 | n/a | n/a | n/a | n/a | n/a | n/a | n/a | n/a |
| 12G | (T/C) % | 101 | 105 | 100 | 94 | 93 | 97 | 96 | 97 | 96 |
| 12H | (T/C) % | 103 | 102 | 99 | 95 | 97 | 96 | 100 | 97 | 98 |
| 12I | (T/C) % | 101 | 106 | 102 | 98 | 97 | 99 | 98 | 98 | 98 |
| 12J | (T/C) % | 103 | 104 | 103 | 103 | 100 | 105 | 101 | 102 | 102 |
| 12K | (T/C) % | 104 | 104 | 103 | 100 | 103 | 98 | 106 | 102 | 102 |

TABLE 56
Field data for Construct 12. Numbers shown in bold are significantly different from the control at the p value shown.
bu/a is bushels per acre. “All” indicates analysis across all events. (T/C) % is the value for the transgenic
hybrid combination (T) expressed as a percent of the control (C). T − C is the transgenic hybrid combination
minus the control. Oil, protein, and amino acid content are shown as percent of seed dry weight.

| | | Yield | Oil | Prot | Arg | Cys | Lys | Met | Thr | Val |
|---|---|---|---|---|---|---|---|---|---|---|
| | Data | (bu/a) | (%) | (%) | (%) | (%) | (%) | (%) | (%) | (%) |
| Event | Description | p ≦ 0.10 | p ≦ 0.15 | p ≦ 0.15 | p ≦ 0.15 | p ≦ 0.15 | p ≦ 0.15 | p ≦ 0.15 | p ≦ 0.15 | p ≦ 0.15 |
| All | Construct (T) | 174.9 | 4.8 | 9.5 | 0.310 | 0.162 | 0.326 | 0.168 | 0.298 | 0.458 |
| All | Control (C) | 183.9 | 4.6 | 9.3 | 0.311 | 0.163 | 0.328 | 0.166 | 0.296 | 0.457 |
| All | T − C | −9.0 | 0.2 | 0.2 | −0.001 | 0.000 | −0.003 | 0.002 | 0.001 | 0.001 |
| All | (T/C) % | 95 | 104 | 102 | 100 | 100 | 99 | 101 | 100 | 100 |
| All | p-value | 0.16 | 0.01 | 0.02 | 0.81 | 0.95 | 0.51 | 0.64 | 0.80 | 0.88 |
| 12E | Construct (T) | 148.1 | n/a | n/a | n/a | n/a | n/a | n/a | n/a | n/a |
| 12E | Control (C) | 183.9 | n/a | n/a | n/a | n/a | n/a | n/a | n/a | n/a |
| 12E | T − C | −35.8 | n/a | n/a | n/a | n/a | n/a | n/a | n/a | n/a |
| 12E | (T/C) % | 81 | n/a | n/a | nia | n/a | n/a | n/a | n/a | n/a |
| 12E | p-value | 0.02 | n/a | n/a | n/a | n/a | n/a | n/a | n/a | n/a |
| 12F | Construct (T) | 145.6 | n/a | n/a | a/a | n/a | n/a | n/a | n/a | n/a |
| 12F | Control (C) | 183.9 | n/a | n/a | n/a | n/a | n/a | n/a | n/a | n/a |
| 12F | T − C | −38.3 | n/a | n/a | n/a | n/a | n/a | n/a | n/a | n/a |
| 12F | (T/C) % | 79 | n/a | n/a | n/a | n/a | n/a | n/a | n/a | n/a |
| 12F | p-value | 0.01 | n/a | n/a | n/a | n/a | n/a | n/a | n/a | n/a |
| 12G | Event (T) | 186.1 | 4.8 | 9.3 | 0.295 | 0.152 | 0.319 | 0.160 | 0.288 | 0.439 |
| 12G | Control (C) | 183.9 | 4.6 | 9.3 | 0.313 | 0.163 | 0.328 | 0.166 | 0.297 | 0.460 |
| 12G | T − C | 2.2 | 0.2 | 0.0 | −0.018 | −0.012 | −0.009 | −0.007 | −0.010 | −0.020 |
| 12G | (T/C) % | 101 | 105 | 100 | 94 | 93 | 97 | 96 | 97 | 96 |
| 12G | p-value | 0.67 | 0.16 | 0.77 | 0.09 | 0.44 | 0.46 | 0.44 | 0.36 | 0.12 |
| 12H | Event (T) | 189.2 | 4.7 | 9.2 | 0.297 | 0.156 | 0.315 | 0.166 | 0.290 | 0.450 |
| 12H | Control (C) | 183.9 | 4.6 | 9.3 | 0.312 | 0.160 | 0.329 | 0.167 | 0.298 | 0.458 |
| 12H | T − C | 5.3 | 0.1 | −0.1 | −0.015 | −0.004 | −0.013 | 0.000 | −0.008 | −0.007 |
| 12H | (T/C) % | 103 | 102 | 99 | 95 | 97 | 96 | 100 | 97 | 98 |
| 12H | p-value | 0.40 | 0.64 | 0.81 | 0.24 | 0.42 | 0.24 | 0.95 | 0.50 | 0.66 |
| 12I | Event (T) | 186.7 | 4.9 | 9.4 | 0.307 | 0.158 | 0.326 | 0.162 | 0.292 | 0.447 |
| 12I | Control (C) | 183.9 | 4.6 | 9.3 | 0.311 | 0.163 | 0.328 | 0.166 | 0.296 | 0.457 |
| 12I | T − C | 2.7 | 0.3 | 0.2 | −0.005 | −0.005 | −0.002 | −0.004 | −0.005 | −0.010 |
| 12I | (T/C) % | 101 | 106 | 102 | 98 | 97 | 99 | 98 | 98 | 98 |
| 12I | p-value | 0.60 | 0.01 | 0.54 | 0.64 | 0.37 | 0.73 | 0.66 | 0.69 | 0.49 |
| 12J | Event (T) | 189.4 | 4.8 | 9.6 | 0.322 | 0.163 | 0.346 | 0.168 | 0.301 | 0.468 |
| 12J | Control (C) | 183.9 | 4.6 | 9.3 | 0.311 | 0.163 | 0.328 | 0.166 | 0.296 | 0.457 |
| 12J | T − C | 5.5 | 0.2 | 0.3 | 0.010 | 0.000 | 0.018 | 0.002 | 0.005 | 0.011 |
| 12J | (T/C) % | 103 | 104 | 103 | 103 | 100 | 105 | 101 | 102 | 102 |
| 12J | p-value | 0.02 | 0.06 | 0.29 | 0.38 | 1.00 | 0.14 | 0.80 | 0.55 | 0.42 |
| 12K | Event (T) | 172.9 | 4.9 | 9.5 | 0.318 | 0.170 | 0.331 | 0.173 | 0.303 | 0.473 |
| 12K | Control (C) | 165.6 | 4.7 | 9.2 | 0.319 | 0.165 | 0.338 | 0.163 | 0.296 | 0.465 |
| 12K | T − C | 7.3 | 0.2 | 0.3 | 0.000 | 0.005 | −0.007 | 0.010 | 0.007 | 0.008 |
| 12K | (T/C) % | 104 | 104 | 103 | 100 | 103 | 98 | 106 | 102 | 102 |
| 12K | p-value | 0.49 | 0.07 | 0.50 | 0.98 | 0.78 | 0.33 | 0.44 | 0.64 | 0.69 |

TABLE 57
Summary of field data for Construct 13. Numbers shown in bold are significantly different from the control
at the p value shown. bu/a is bushels per acre. “All” indicates analysis across all events.
(T/C) % is the value for the transgenic hybrid combination (T) expressed as a percent of the control (C).

| | | Yield | Oil | Prot | Arg | Cys | Lys | Met | Thr | Val |
|---|---|---|---|---|---|---|---|---|---|---|
| | Data | (bu/a) | (%) | (%) | (%) | (%) | (%) | (%) | (%) | (%) |
| Event | Description | p ≦ 0.10 | p ≦ 0.15 | p ≦ 0.15 | p ≦ 0.15 | p ≦ 0.15 | p ≦ 0.15 | p ≦ 0.15 | p ≦ 0.15 | p ≦ 0.15 |
| All | (T/C) % | 96 | 101 | 105 | 106 | 108 | 105 | 102 | 104 | 105 |
| 13L | (T/C) % | 96 | 108 | 104 | 109 | 116 | 108 | 107 | 104 | 106 |
| 13M | (T/C) % | 97 | 105 | 103 | 101 | 99 | 105 | 95 | 98 | 102 |
| 13N | (T/C) % | 95 | 97 | 109 | 109 | 120 | 107 | 107 | 108 | 108 |
| 13O | (T/C) % | 97 | 103 | 105 | 102 | 107 | 99 | 102 | 101 | 103 |
| 13P | (T/C) % | 95 | 102 | 104 | 110 | 108 | 108 | 99 | 107 | 107 |
| 13Q | (T/C) % | 97 | 100 | 103 | 105 | 101 | 105 | 101 | 103 | 104 |

TABLE 58
Field data for Construct 13. Numbers shown in bold are significantly different from the control at the p value shown.
bu/a is bushels per acre. “All” indicates analysis across all events. (T/C) % is the value for the transgenic
hybrid combination (T) expressed as a percent of the control (C). T − C is the transgenic hybrid combination
minus the control. Oil, protein, and amino acid content are shown as percent of seed dry weight.

| | | Yield | Oil | Prot | | Cys | Lys | Met | Thr | Val |
|---|---|---|---|---|---|---|---|---|---|---|
| | Data | (bu/a) | (%) | (%) | Arg | (%) | (%) | (%) | (%) | (%) |
| Event | Description | p ≦ 0.10 | p ≦ 0.15 | p ≦ 0.15 | (%) p ≦ 0.15 | p ≦ 0.15 | p ≦ 0.15 | p ≦ 0.15 | p ≦ 0.15 | p ≦ 0.15 |
| All | Construct (T) | 185.1 | 4.7 | 9.6 | 0.307 | 0.143 | 0.319 | 0.162 | 0.293 | 0.451 |
| All | Control (C) | 191.9 | 4.6 | 9.2 | 0.290 | 0.132 | 0.305 | 0.159 | 0.283 | 0.432 |
| All | T − C | −6.8 | 0.1 | 0.4 | 0.017 | 0.011 | 0.014 | 0.003 | 0.010 | 0.020 |
| All | (T/C) % | 96 | 101 | 105 | 106 | 108 | 105 | 102 | 104 | 105 |
| All | p-value | 0.00 | 0.30 | 0.02 | 0.09 | 0.29 | 0.14 | 0.40 | 0.12 | 0.06 |
| 13L | Event (T) | 186.1 | 4.8 | 9.5 | 0.317 | 0.151 | 0.329 | 0.169 | 0.298 | 0.459 |
| 13L | Control (C) | 193.1 | 4.5 | 9.1 | 0.291 | 0.130 | 0.305 | 0.158 | 0.288 | 0.432 |
| 13L | T − C | −7.0 | 0.3 | 0.4 | 0.026 | 0.021 | 0.024 | 0.011 | 0.010 | 0.028 |
| 13L | (T/C) % | 96 | 108 | 104 | 109 | 116 | 108 | 107 | 104 | 106 |
| 13L | p-value | 0.12 | 0.15 | 0.13 | 0.25 | 0.23 | 0.06 | 0.19 | 0.48 | 0.15 |
| 13M | Event (T) | 187.3 | 4.8 | 9.4 | 0.296 | 0.131 | 0.319 | 0.152 | 0.282 | 0.441 |
| 13M | Control (C) | 192.2 | 4.5 | 9.2 | 0.292 | 0.133 | 0.304 | 0.159 | 0.287 | 0.434 |
| 13M | T − C | −4.9 | 0.2 | 0.3 | 0.003 | −0.002 | 0.015 | −0.007 | −0.005 | 0.007 |
| 13M | (T/C) % | 97 | 105 | 103 | 101 | 99 | 105 | 95 | 98 | 102 |
| 13M | p-value | 0.16 | 0.30 | 0.08 | 0.85 | 0.88 | 0.47 | 0.31 | 0.74 | 0.67 |
| 13N | Event (T) | 182.8 | 4.6 | 9.9 | 0.311 | 0.153 | 0.325 | 0.165 | 0.302 | 0.460 |
| 13N | Control (C) | 191.9 | 4.7 | 9.1 | 0.286 | 0.127 | 0.305 | 0.155 | 0.279 | 0.427 |
| 13N | T − C | −9.1 | −0.1 | 0.8 | 0.025 | 0.026 | 0.020 | 0.011 | 0.023 | 0.033 |
| 13N | (T/C) % | 95 | 97 | 109 | 109 | 120 | 107 | 107 | 108 | 108 |
| 13N | p-value | 0.02 | 0.02 | 0.11 | 0.20 | 0.10 | 0.30 | 0.05 | 0.08 | 0.10 |
| 13O | Event (T) | 180.3 | 4.8 | 9.7 | 0.296 | 0.141 | 0.303 | 0.162 | 0.286 | 0.443 |
| 13O | Control (C) | 186.3 | 4.6 | 9.2 | 0.290 | 0.132 | 0.305 | 0.159 | 0.283 | 0.432 |
| 13O | T − C | −6.0 | 0.1 | 0.5 | 0.007 | 0.009 | −0.002 | 0.003 | 0.004 | 0.011 |
| 13O | (T/C) % | 97 | 103 | 105 | 102 | 107 | 99 | 102 | 101 | 103 |
| 13O | p-value | 0.16 | 0.02 | 0.01 | 0.53 | 0.53 | 0.88 | 0.58 | 0.61 | 0.24 |
| 13P | Event (T) | 182.8 | 4.6 | 9.5 | 0.320 | 0.143 | 0.328 | 0.158 | 0.308 | 0.463 |
| 13P | Control (C) | 193.4 | 4.5 | 9.2 | 0.292 | 0.133 | 0.304 | 0.159 | 0.287 | 0.434 |
| 13P | T − C | −10.6 | 0.1 | 0.4 | 0.028 | 0.010 | 0.024 | −0.001 | 0.021 | 0.029 |
| 13P | (T/C) % | 95 | 102 | 104 | 110 | 108 | 108 | 99 | 107 | 107 |
| 13P | p-value | 0.02 | 0.41 | 0.13 | 0.02 | 0.56 | 0.03 | 0.81 | 0.00 | 0.08 |
| 13Q | Event (T) | 186.8 | 4.6 | 9.4 | 0.301 | 0.131 | 0.317 | 0.154 | 0.287 | 0.441 |
| 13Q | Control (C) | 191.9 | 4.6 | 9.1 | 0.287 | 0.131 | 0.301 | 0.152 | 0.278 | 0.426 |
| 13Q | T − C | −5.1 | 0.0 | 0.3 | 0.014 | 0.001 | 0.016 | 0.002 | 0.009 | 0.015 |
| 13Q | (T/C) % | 97 | 100 | 103 | 105 | 101 | 105 | 101 | 103 | 104 |
| 13Q | p-value | 0.18 | 1.00 | 0.21 | 0.05 | 0.92 | 0.03 | 0.51 | 0.05 | 0.17 |

TABLE 59
Summary of field data for Construct 14. Numbers shown in bold are significantly different from the control
at the p value shown. bu/a is bushels per acre. “All” indicates analysis across all events.
(T/C) % is the value for the transgenic hybrid combination (T) expressed as a percent of the control (C).

| | | Yield | Oil | Prot | Arg | Cys | Lys | Met | Thr | Val |
|---|---|---|---|---|---|---|---|---|---|---|
| | Data | (bu/a) | (%) | (%) | (%) | (%) | (%) | (%) | (%) | (%) |
| Event | Description | p ≦ 0.10 | p ≦ 0.15 | p ≦ 0.15 | p ≦ 0.15 | p ≦ 0.15 | p ≦ 0.15 | p ≦ 0.15 | p ≦ 0.15 | p ≦ 0.15 |
| All | (T/C) % | 96 | 102 | 103 | 100 | 105 | 99 | 102 | 101 | 101 |
| 14R | (T/C) % | 95 | 105 | 104 | 98 | 106 | 97 | 102 | 102 | 103 |
| 14S | (T/C) % | 82 | 102 | 113 | 107 | 126 | 101 | 113 | 106 | 107 |
| 14T | (T/C) % | 99 | 100 | 98 | 97 | 91 | 98 | 99 | 98 | 98 |
| 14U | (T/C) % | 102 | 103 | 101 | 99 | 101 | 100 | 98 | 100 | 100 |
| 14V | (T/C) % | 98 | 104 | 102 | 97 | 105 | 96 | 102 | 100 | 99 |

TABLE 60
Field data for Construct 14. Numbers shown in bold are significantly different from the control at the p value shown.
bu/a is bushels per acre. “All” indicates analysis across all events. (T/C) % is the value for the transgenic
hybrid combination (T) expressed as a percent of the control (C). T − C is the transgenic hybrid combination
minus the control. Oil, protein, and amino acid content are shown as percent of seed dry weight.

| | | Yield | Oil | Prot | Arg | Cys | Lys | Met | Thr | Val |
|---|---|---|---|---|---|---|---|---|---|---|
| | Data | (bu/a) | (%) | (%) | (%) | (%) | (%) | (%) | (%) | (%) |
| Event | Description | p ≦ 0.10 | p ≦ 0.15 | p ≦ 0.15 | p ≦ 0.15 | p ≦ 0.15 | p ≦ 0.15 | p ≦ 0.15 | p ≦ 0.15 | p ≦ 0.15 |
| All | Construct (T) | 195.1 | 4.7 | 9.4 | 0.315 | 0.160 | 0.316 | 0.166 | 0.305 | 0.445 |
| All | Control (C) | 203.4 | 4.6 | 9.1 | 0.316 | 0.153 | 0.320 | 0.163 | 0.301 | 0.439 |
| All | T − C | −8.4 | 0.1 | 0.3 | −0.001 | 0.007 | −0.003 | 0.003 | 0.004 | 0.006 |
| All | (T/C) % | 96 | 102 | 103 | 100 | 105 | 99 | 102 | 101 | 101 |
| All | p-value | 0.22 | 0.03 | 0.28 | 0.89 | 0.35 | 0.72 | 0.35 | 0.33 | 0.36 |
| 14R | Event (T) | 193.8 | 4.9 | 9.4 | 0.311 | 0.162 | 0.312 | 0.164 | 0.307 | 0.450 |
| 14R | Control (C) | 203.4 | 4.6 | 9.1 | 0.316 | 0.152 | 0.322 | 0.161 | 0.301 | 0.437 |
| 14R | T − C | −9.6 | 0.2 | 0.3 | −0.005 | 0.009 | −0.010 | 0.003 | 0.007 | 0.013 |
| 14R | (T/C) % | 95 | 105 | 104 | 98 | 106 | 97 | 102 | 102 | 103 |
| 14R | p-value | 0.04 | 0.02 | 0.31 | 0.62 | 0.33 | 0.50 | 0.54 | 0.16 | 0.14 |
| 14S | Event (T) | 166.4 | 4.7 | 10.3 | 0.337 | 0.190 | 0.325 | 0.184 | 0.321 | 0.472 |
| 14S | Control (C) | 203.6 | 4.6 | 9.1 | 0.316 | 0.150 | 0.321 | 0.163 | 0.302 | 0.440 |
| 14S | T − C | −37.2 | 0.1 | 1.2 | 0.021 | 0.039 | 0.005 | 0.022 | 0.019 | 0.032 |
| 14S | (T/C) % | 82 | 102 | 113 | 107 | 126 | 101 | 113 | 106 | 107 |
| 14S | p-value | 0.02 | 0.02 | 0.05 | 0.03 | 0.09 | 0.69 | 0.05 | 0.01 | 0.01 |
| 14T | Event (T) | 202.4 | 4.6 | 8.9 | 0.309 | 0.141 | 0.316 | 0.161 | 0.297 | 0.430 |
| 14T | Control (C) | 203.4 | 4.6 | 9.1 | 0.318 | 0.155 | 0.322 | 0.162 | 0.302 | 0.440 |
| 14T | T − C | −1.0 | 0.0 | −0.2 | −0.009 | −0.013 | −0.006 | −0.001 | −0.005 | −0.010 |
| 14T | (T/C) % | 99 | 100 | 98 | 97 | 91 | 98 | 99 | 98 | 98 |
| 14T | p-value | 0.85 | 0.78 | 0.52 | 0.14 | 0.17 | 0.49 | 0.40 | 0.32 | 0.22 |
| 14U | Event (T) | 207.0 | 4.8 | 9.2 | 0.312 | 0.155 | 0.320 | 0.160 | 0.300 | 0.437 |
| 14U | Control (C) | 203.4 | 4.6 | 9.1 | 0.316 | 0.153 | 0.320 | 0.163 | 0.301 | 0.439 |
| 14U | T − C | 3.6 | 0.1 | 0.1 | −0.004 | 0.002 | 0.001 | −0.003 | −0.001 | −0.002 |
| 14U | (T/C) % | 102 | 103 | 101 | 99 | 101 | 100 | 98 | 100 | 100 |
| 14U | p-value | 0.68 | 0.05 | 0.80 | 0.57 | 0.89 | 0.97 | 0.42 | 0.85 | 0.91 |
| 14V | Event (T) | 199.6 | 4.8 | 9.3 | 0.307 | 0.160 | 0.307 | 0.167 | 0.301 | 0.436 |
| 14V | Control (C) | 203.4 | 4.6 | 9.1 | 0.316 | 0.153 | 0.320 | 0.163 | 0.301 | 0.439 |
| 14V | T − C | −3.8 | 0.2 | 0.1 | −0.009 | 0.007 | −0.013 | 0.004 | 0.000 | −0.003 |
| 14V | (T/C) % | 98 | 104 | 102 | 97 | 105 | 96 | 102 | 100 | 99 |
| 14V | p-value | 0.73 | 0.03 | 0.70 | 0.71 | 0.65 | 0.50 | 0.69 | 0.97 | 0.89 |

TABLE 61
Summary of field data for Construct 26. Numbers shown in bold are significantly different from the control
at the p value shown. “All” indicates analysis across all events or testers. (T/C) % is the value for
the transgenic hybrid combination (T) expressed as a percent of the control (C).

| | | | Oil | Prot | Arg | Cys | Ile | Lys | Met | Thr | Val |
|---|---|---|---|---|---|---|---|---|---|---|---|
| | | Data | (%) | (%) | (%) | (%) | (%) | (%) | (%) | (%) | (%) |
| Event | Tester | Description | p ≦ 0.15 | p ≦ 0.15 | p ≦ 0.15 | p ≦ 0.15 | p ≦ 0.15 | p ≦ 0.15 | p ≦ 0.15 | p ≦ 0.15 | p ≦ 0.15 |
| All | All | (T/C) % | 107 | 110 | 109 | 107 | 112 | 109 | 107 | 108 | 112 |
| All | 1 | (T/C) % | 107 | 108 | 107 | 105 | 107 | 108 | 104 | 106 | 108 |
| All | 2 | (T/C) % | 102 | 112 | 111 | 109 | 120 | 110 | 111 | 112 | 119 |
| 26A | 1 | (T/C) % | 109 | 98 | 100 | 91 | 98 | 108 | 93 | 99 | 100 |
| 26B | All | (T/C) % | 112 | 121 | 111 | 110 | 124 | 104 | 117 | 114 | 123 |
| 26C | All | (T/C) % | 102 | 110 | 109 | 103 | 113 | 111 | 104 | 109 | 112 |
| 26D | All | (T/C) % | 100 | 118 | 119 | 128 | 123 | 112 | 118 | 113 | 121 |
| 26E | All | (T/C) % | 105 | 104 | 106 | 104 | 105 | 111 | 103 | 105 | 106 |

TABLE 62
Summary of field data for Construct 29. Numbers shown in bold are significantly different from the control at the p value shown.
“All” indicates analysis across all events or testers. (T/C) % is the value for the transgenic hybrid combination (T)
expressed as a percent of the control (C).

| | | | Oil | Prot | Arg | Cys | Ile | Lys | Met | Thr | Val |
|---|---|---|---|---|---|---|---|---|---|---|---|
| | | Data | (%) | (%) | (%) | (%) | (%) | (%) | (%) | (%) | (%) |
| Event | Tester | Description | p ≦ 0.15 | p ≦ 0.15 | p ≦ 0.15 | p ≦ 0.15 | p ≦ 0.15 | p ≦ 0.15 | p ≦ 0.15 | p ≦ 0.15 | p ≦ 0.15 |
| All | All | (T/C) % | 100 | 100 | 109 | 104 | 102 | 114 | 104 | 103 | 106 |
| All | 1 | (T/C) % | 96 | 101 | 109 | 105 | 104 | 113 | 105 | 104 | 107 |
| All | 2 | (T/C) % | 100 | 98 | 109 | 101 | 99 | 115 | 104 | 102 | 105 |
| 29F | All | (T/C) % | 98 | 102 | 96 | 96 | 98 | 99 | 97 | 99 | 100 |
| 29G | All | (T/C) % | 100 | 107 | 112 | 106 | 105 | 113 | 108 | 106 | 108 |
| 29G | 1 | (T/C) % | 102 | 110 | 113 | 108 | 109 | 112 | 110 | 108 | 110 |
| 29G | 2 | (T/C) % | 98 | 102 | 111 | 104 | 101 | 115 | 106 | 104 | 106 |
| 29H | All | (T/C) % | 102 | 96 | 109 | 103 | 99 | 112 | 103 | 101 | 104 |
| 29H | 1 | (T/C) % | 100 | 94 | 108 | 101 | 98 | 113 | 99 | 100 | 103 |
| 29H | 2 | (T/C) % | 100 | 98 | 110 | 105 | 100 | 110 | 106 | 102 | 105 |
| 29J | All | (T/C) % | 98 | 100 | 110 | 98 | 101 | 120 | 102 | 104 | 107 |
| 29J | 1 | (T/C) % | 98 | 106 | 112 | 103 | 107 | 116 | 107 | 107 | 110 |
| 29J | 2 | (T/C) % | 95 | 93 | 109 | 93 | 96 | 123 | 98 | 101 | 102 |
| 29K | All | (T/C) % | 98 | 96 | 104 | 100 | 97 | 119 | 100 | 100 | 102 |
| 29K | 1 | (T/C) % | 94 | 94 | 108 | 105 | 97 | 124 | 102 | 102 | 102 |
| 29K | 2 | (T/C) % | 98 | 98 | 100 | 95 | 96 | 114 | 97 | 98 | 102 |
| 29L | 1 | (T/C) % | 91 | 107 | 115 | 116 | 110 | 116 | 113 | 109 | 110 |
| 29M | All | (T/C) % | 102 | 93 | 114 | 108 | 101 | 121 | 106 | 105 | 108 |
| 29N | All | (T/C) % | 98 | 103 | 112 | 111 | 110 | 110 | 109 | 107 | 114 |
| 29N | 1 | (T/C) % | 91 | 108 | 114 | 114 | 115 | 109 | 106 | 110 | 117 |
| 29N | 2 | (T/C) % | 100 | 93 | 111 | 108 | 105 | 111 | 112 | 104 | 111 |
| 29P | All | (T/C) % | 105 | 93 | 107 | 98 | 98 | 115 | 103 | 101 | 103 |

The application's sequence listing, which the Patent Office published only in electronic form, follows.

SEQUENCE LISTING (191 sequences)

SEQ ID NO: 1 - DNA, 1740 bp, Arabidopsis thaliana
atggctcaagtggttgctaccaggtcaattcaaggctcgatgttatctcccaacggtggatctgtgtctacaagatccgagaagctattgaaaccagcgagttttgcagtgaaggttcttggcaacgaagcaaagagaagtggaagagtctctgtaagaagcagaagagtggttgatactactgtgagatccgctcgtgttgagactgaagtcattcctgtttctcctgaagatgtgcctaacagagaggagcagcttgagaggttgttggaaatgcagcagtttggtgatacatcggtagggatgtggtcgaagccgacagtgaggaggaagacaaagattgtttgcaccgttggtccgtcgaccaacacacgagaaatgatatggaaattggctgaagctgggatgaatgttgctaggatgaatatgtctcatggagatcatgcttcacataagaaggttattgatttggttaaagaatacaatgcacaaactaaagacaacactattgctatcatgcttgacaccaagggtccggaagttaggagtggagatttacctcagccaattatgttagatcctggtcaagagtttacctttacaattgagagaggagtcagcacaccaagttgtgtcagtgttaactatgatgatttcgttaatgacgtggaagcgggtgacatgcttcttgttgatggtggtatgatgtcgtttatggtgaagtcaaagaccaaagactctgtcaaatgtgaagttgttgatggtggagaacttaagtcaaggagacacctgaatgtccgaggaaagagtgcaactttaccttcaatcactgagaaggactgggaggatattaaatttggagtggagaacaaagttgacttttatgcagtttcctttgtcaaagatgctcaagttgtacacgagttgaagaaataccttcaaaatagtggtgctgatatacacgtgatagtgaaaattgagagtgcagactccatacctaacttgcactccattatcacagcatcagatggggcaatggttgcaagaggtgatcttggtgcagagcttccaattgaagaagtccccattcttcaggaggagatcattaacctgtgccgtagtatgggaaaagctgttattgttgcgactaacatgcttgagagtatgatagttcatccaactccaacccgggcagaggtctcagacattgctatcgctgttagagaaggtgctgatgcggtaatgctttcaggagaaactgctcacggaaagttcccattgaaagctgctggagtgatgcacactgttgcattgcgaacagaagcaaccattactagcggtgaaatgccacctaatcttggtcaagccttcaagaaccatatgagtgagatgtttgcataccatgcaaccatgatgtcaaacacacttggaacttcaactgttgtcttcaccagaaccggtttcatggccatattgttaagtcactatcgtccttccggcacaatctatgccttcacaaatgagaaaaaaatacaacaaagattagctttgtatcaaggtgtatgccccatatatatggagttcacagatgatgcagaagaaacttttgctaatgctttggctacattactgaaacaaggaatggtgaagaagggagaggaaatagcaatcgtacagagcggtacacagccaatctggcgatctcaatcgacacataacatccaagtccgcaaggtttaa

SEQ ID NO: 2 - protein, 579 aa, Arabidopsis thaliana
MAQVVATRSIQGSMLSPNGGSVSTRSEKLLKPASFAVKVLGNEAKRSGRVSVRSRRVVDTTVRSARVETEVIPVSPEDVPNREEQLERLLEMQQFGDTSVGMWSKPTVRRKTKIVCTVGPSTNTREMIWKLAEAGMNVARMNMSHGDHASHKKVIDLVKEYNAQTKDNTIAIMLDTKGPEVRSGDLPQPIMLDPGQEFTFTIERGVSTPSCVSVNYDDFVNDVEAGDMLLVDGGMMSFMVKSKTKDSVKCEVVDGGELKSRRHLNVRGKSATLPSITEKDWEDIKFGVENKVDFYAVSFVKDAQVVHELKKYLQNSGADIHVIVKIESADSIPNLHSIITASDGAMVARGDLGAELPIEEVPILQEEIINLCRSMGKAVIVATNMLESMIVHPTPTRAEVSDIAIAVREGADAVMLSGETAHGKFPLKAAGVMHTVALRTEATITSGEMPPNLGQAFKNHMSEMFAYHATMMSNTLGTSTVVFTRTGFMAILLSHYRPSGTIYAFTNEKKIQQRLALYQGVCPIYMEFTDDAEETFANALATLLKQGMVKKGEEIAIVQSGTQPIWRSQSTHNIQVRKV

SEQ ID NO: 3 - DNA, 1551 bp, Arabidopsis thaliana
tccgctcgtgttgagactgaagtcattcctgtttctcctgaagatgtgcctaacagagaggagcagcttgagaggttgttggaaatgcagcagtttggtgatacatcggtagggatgtggtcgaagccgacagtgaggaggaagacaaagattgtttgcaccgttggtccgtcgaccaacacacgagaaatgatatggaaattggctgaagctgggatgaatgttgctaggatgaatatgtctcatggagatcatgcttcacataagaaggttattgatttggttaaagaatacaatgcacaaactaaagacaacactattgctatcatgcttgacaccaagggtccggaagttaggagtggagatttacctcagccaattatgttagatcctggtcaagagtttacctttacaattgagagaggagtcagcacaccaagttgtgtcagtgttaactatgatgatttcgttaatgacgtggaagcgggtgacatgcttcttgttgatggtggtatgatgtcgtttatggtgaagtcaaagaccaaagactctgtcaaatgtgaagttgttgatggtggagaacttaagtcaaggagacacctgaatgtccgaggaaagagtgcaactttaccttcaatcactgagaaggactgggaggatattaaatttggagtggagaacaaagttgacttttatgcagtttcctttgtcaaagatgctcaagttgtacacgagttgaagaaataccttcaaaatagtggtgctgatatacacgtgatagtgaaaattgagagtgcagactccatacctaacttgcactccattatcacagcatcagatggggcaatggttgcaagaggtgatcttggtgcagagcttccaattgaagaagtccccattcttcaggaggagatcattaacctgtgccgtagtatgggaaaagctgttattgttgcgactaacatgcttgagagtatgatagttcatccaactccaacccgggcagaggtctcagacattgctatcgctgttagagaaggtgctgatgcggtaatgctttcaggagaaactgctcacggaaagttcccattgaaagctgctggagtgatgcacactgttgcattgcgaacagaagcaaccattactagcggtgaaatgccacctaatcttggtcaagccttcaagaaccatatgagtgagatgtttgcataccatgcaaccatgatgtcaaacacacttggaacttcaactgttgtcttcaccagaaccggtttcatggccatattgttaagtcactatcgtccttccggcacaatctatgccttcacaaatgagaaaaaaatacaacaaagattagctttgtatcaaggtgtatgccccatatatatggagttcacagatgatgcagaagaaacttttgctaatgctttggctacattactgaaacaaggaatggtgaagaagggagaggaaatagcaatcgtacagagcggtacacagccaatctggcgatctcaatcgacacataacatccaagtccgcaaggtttaa

SEQ ID NO: 4 - protein, 516 aa, Arabidopsis thaliana
SARVETEVIPVSPEDVPNREEQLERLLEMQQFGDTSVGMWSKPTVRRKTKIVCTVGPSTNTREMIWKLAEAGMNVARMNMSHGDHASHKKVIDLVKEYNAQTKDNTIAIMLDTKGPEVRSGDLPQPIMLDPGQEFTFTIERGVSTPSCVSVNYDDFVNDVEAGDMLLVDGGMMSFMVKSKTKDSVKCEVVDGGELKSRRHLNVRGKSATLPSITEKDWEDIKFGVENKVDFYAVSFVKDAQVVHELKKYLQNSGADIHVIVKIESADSIPNLHSIITASDGAMVARGDLGAELPIEEVPILQEEIINLCRSMGKAVIVATNMLESMIVHPTPTRAEVSDIAIAVREGADAVMLSGETAHGKFPLKAAGVMHTVALRTEATITSGEMPPNLGQAFKNHMSEMFAYHATMMSNTLGTSTVVFTRTGFMAILLSHYRPSGTIYAFTNEKKIQQRLALYQGVCPIYMEFTDDAEETFANALATLLKQGMVKKGEEIAIVQSGTQPIWRSQSTHNIQVRKV

SEQ ID NO: 5 - DNA, 1962 bp, Arabidopsis thaliana
atgcagaagggcgaattcgacccaagtttgtacaaaaaagcaggctccaccatggcttctacactctctaccctctcggtgagcgcatcgttgttgccaaagcaacaaccgatggtcgcctcatcgctaccaaccaacatgggccaagccttgtttggactgaaagccggttctcgtggcagagtgactgcaatggccacataccatatgcggcgcgccaccatggctcaagtggttgctaccaggtcaattcaaggctcgatgttatctcccaacggtggatctgtgtctacaagatccgagaagctattgaaaccagcgagttttgcagtgaaggttcttggcaacgaagcaaagagaagtggaagagtctctgtaagaagcagaagagtggttgatactactgtgagatccgctcgtgttgagactgaagtcattcctgtttctcctgaagatgtgcctaacagagaggagcagcttgagaggttgttggaaatgcagcagtttggtgatacatcggtagggatgtggtcgaagccgacagtgaggaggaagacaaagattgtttgcaccgttggtccgtcgaccaacacacgagaaatgatatggaaattggctgaagctgggatgaatgttgctaggatgaatatgtctcatggagatcatgcttcacataagaaggttattgatttggttaaagaatacaatgcacaaactaaagacaacactattgctatcatgcttgacaccaagggtccggaagttaggagtggagatttacctcagccaattatgttagatcctggtcaagagtttacctttacaattgagagaggagtcagcacaccaagttgtgtcagtgttaactatgatgatttcgttaatgacgtggaagcgggtgacatgcttcttgttgatggtggtatgatgtcgtttatggtgaagtcaaagaccaaagactctgtcaaatgtgaagttgttgatggtggagaacttaagtcaaggagacacctgaatgtccgaggaaagagtgcaactttaccttcaatcactgagaaggactgggaggatattaaatttggagtggagaacaaagttgacttttatgcagtttcctttgtcaaagatgctcaagttgtacacgagttgaagaaataccttcaaaatagtggtgctgatatacacgtgatagtgaaaattgagagtgcagactccatacctaacttgcactccattatcacagcatcagatggggcaatggttgcaagaggtgatcttggtgcagagcttccaattgaagaagtccccattcttcaggaggagatcattaacctgtgccgtagtatgggaaaagctgttattgttgcgactaacatgcttgagagtatgatagttcatccaactccaacccgggcagaggtctcagacattgctatcgctgttagagaaggtgctgatgcggtaatgctttcaggagaaactgctcacggaaagttcccattgaaagctgctggagtgatgcacactgttgcattgcgaacagaagcaaccattactagcggtgaaatgccacctaatcttggtcaagccttcaagaaccatatgagtgagatgtttgcataccatgcaaccatgatgtcaaacacacttggaacttcaactgttgtcttcaccagaaccggtttcatggccatattgttaagtcactatcgtccttccggcacaatctatgccttcacaaatgagaaaaaaatacaacaaagattagctttgtatcaaggtgtatgccccatatatatggagttcacagatgatgcagaagaaacttttgctaatgctttggctacattactgaaacaaggaatggtgaagaagggagaggaaatagcaatcgtacagagcggtacacagccaatctggcgatctcaatcgacacataacatccaagtccgcaaggtttaa

SEQ ID NO: 6 - protein, 653 aa, Arabidopsis thaliana
MQKGEFDPSLYKKAGSTMASTLSTLSVSASLLPKQQPMVASSLPTNMGQALFGLKAGSRGRVTAMATYHMRRATMAQVVATRSIQGSMLSPNGGSVSTRSEKLLKPASFAVKVLGNEAKRSGRVSVRSRRVVDTTVRSARVETEVIPVSPEDVPNREEQLERLLEMQQFGDTSVGMWSKPTVRRKTKIVCTVGPSTNTREMIWKLAEAGMNVARMNMSHGDHASHKKVIDLVKEYNAQTKDNTIAIMLDTKGPEVRSGDLPQPIMLDPGQEFTFTIERGVSTPSCVSVNYDDFVNDVEAGDMLLVDGGMMSFMVKSKTKDSVKCEVVDGGELKSRRHLNVRGKSATLPSITEKDWEDIKFGVENKVDFYAVSFVKDAQVVHELKKYLQNSGADIHVIVKIESADSIPNLHSIITASDGAMVARGDLGAELPIEEVPILQEEIINLCRSMGKAVIVATNMLESMIVHPTPTRAEVSDIAIAVREGADAVMLSGETAHGKFPLKAAGVMHTVALRTEATITSGEMPPNLGQAFKNHMSEMFAYHATMMSNTLGTSTVVFTRTGFMAILLSHYRPSGTIYAFTNEKKIQQRLALYQGVCPIYMEFTDDAEETFANALATLLKQGMVKKGEEIAIVQSGTQPIWRSQSTHNIQVRKV

SEQ ID NO: 7 - DNA, 1740 bp, Artificial sequence
  codon optimized sequence of AtPK920 for expression in Zea mays
atggcccaggtcgtggccacccgttcgatccaaggttctatgttatctccgaacggtgggagtgtctccacgcgttcggaaaaattgctcaagcctgcgtcttttgccgtcaaggttctcggcaatgaagctaagcgctcgggaagagtttccgttcgctctagacgtgtcgtagacactaccgtcaggtccgcaagggtggaaactgaggtgattcccgtgtctccagaggacgtcccaaaccgagaggaacagttggagcgtcttctcgagatgcaacagtttggtgatacgagcgtgggtatgtggtctaagcccactgtccgccgaaagacgaagatcgtctgcactgtgggaccaagcacaaacacgcgtgagatgatctggaagttagcggaggctggtatgaacgtcgctaggatgaatatgtcacacggtgatcatgcgtctcacaagaaagtgatcgacctagttaaggagtacaacgcccaaaccaaggacaatacaatagcgataatgctggacactaaggggcctgaggttcgtagtggggatctccctcaaccgatcatgctggaccctggacaagagttcactttcacgatagaaaggggagtatctacgccgagttgcgtcagcgtgaactacgatgacttcgtcaacgacgttgaagccggcgatatgcttctggttgatgggggcatgatgagcttcatggtgaagagcaaaacgaaggactcggtgaagtgtgaagtggttgatggcggtgagctgaaatcaaggaggcatctgaacgtaagagggaaatcggcaactttgccgtcgataaccgaaaaggactgggaggatatcaagttcggtgtggagaataaggttgacttctatgctgtctcgttcgtgaaggacgcccaagtggtccacgagttgaagaaatacctacagaacagcggtgccgatatccatgtgatcgtaaagatcgagagcgcagattcaatccctaatcttcatagtattatcaccgcgtcagacggagcaatggtggcacgtggcgacctcggtgctgagttgccaattgaggaagtcccgatccttcaagaggaaattatcaacctctgtaggtcaatggggaaagcggtgatcgttgccacaaacatgcttgagtctatgatcgtccaccctaccccaacccgagctgaggtctcggatatcgctatagcggttcgagagggtgctgacgcggtgatgctatctggtgagacagctcacggcaagttccccttgaaagccgctggtgttatgcataccgtcgcgttgcgcacagaagctacgatcacaagcggcgagatgcctcccaacctcggtcaagccttcaagaaccacatgagcgagatgttcgcttaccacgcgacaatgatgagcaacacgctgggtacaagtacagtggtctttacacgcacgggctttatggcgatactgctctcccactatcgtccttctggcactatctacgctttcaccaacgagaagaaaatccaacagcgcctcgctctctaccaaggagtctgcccaatttacatggagtttactgacgatgcggaggagacgttcgcaaatgcgttggcaaccctcctgaagcaaggaatggtcaagaaaggagaagagattgcaatcgtacaaagtggaacccagccgatttggagatcccaatcaactcacaatatccaagtgaggaaagtgtga

SEQ ID NO: 8 - protein, 579 aa, Arabidopsis thaliana; identical to SEQ ID NO: 2

SEQ ID NO: 9 - DNA, 1716 bp, Arabidopsis thaliana
atggctgcttatggtcaaatctcctcgggaatgactgtagatcctcaggttctctcttcctccagaaacattggagtttccctatcacctctccggagaacactaatcggcgccggagttaggtctactagtatctctctccgtcaatgttctctctccgttagatcgattaaaatctccgaagatagccgcaaacctaaagcttatgcagagaacggtgcttttgatgtgggagttttggattcttcatcatatagattggctgattcaagaacaagtagtaatgattcaaggaggaagactaagattgtgtgtacgattggaccgtcttcgagttctagggaaatgatttggaaactcgcggaagctggaatgaatgtggctcgtttgaatatgtctcatggtgatcatgcttctcatcagataactattgatttagttaaggagtataattctttgtttgttgacaaagctattgctattatgttggatacaaagggtcctgaggttcgaagcggggatgtaccgcagccgatatttcttgaagagggtcaagagtttaactttactatcaagagaggtgtttcgcttaaagacactgttagtgtaaattatgatgattttgtgaacgatgttgaagttggggatatacttttggtggatggtggaatgatgtcgttagctgttaaatcaaagacgagtgatttggtgaagtgtgtggttattgatggtggagagcttcaatctagacgtcacttgaatgttcgaggaaagagtgcgactcttccatccattacagacaaagattgggaagacataaaatttggagtggacaaccaagtcgatttctacgccgtctcctttgttaaggatgctaaagttgtccatgagttgaagaactatctcaaaacctgcagtgcagacatatcggtgattgtgaaaattgaaagtgcagactctataaagaatcttccttctatcatatctgcttgtgatggggcaatggttgctcgtggagatcttggagctgaacttcccattgaagaggtcccgttgttacaggaagaaataatcagaaggtgtagaagcattcataaaccagtgattgttgccacaaacatgctagagagtatgattaatcatccaacgcctacaagagctgaagtctctgacattgcaattgcagtacgtgaaggcgcagatgctatcatgctttctggtgaaaccgcacatggaaagtttccgctgaaagctgttaacgtaatgcatactgtggcgttgagaaccgaggcaagtctacctgtcagaacctcggcatcccgtaccactgcttacaagggtcacatgggccaaatgtttgcttttcatgcttctataatggcaaatacactgagctcaccgctaattgtatttacgagaaccggatccatggcagtgcttctaagccactaccgcccatctgcaacaattttcgccttcacaaaccagagaagaataatgcaaaggcttgctctttatcaaggtgtcatgcctatatatatggagttctcggatgatgcagaagatacatatgcccggtctctcaaactcttacaggacgagaatatgctcaaggaaggacaacatgtaactcttgtccaaagtggctcgcaacccatttggcgtgaagaatcaacacatctcatacaagtccgtaagataaagataggtggatga

SEQ ID NO: 10 - protein, 571 aa, Arabidopsis thaliana
MAAYGQISSGMTVDPQVLSSSRNIGVSLSPLRRTLIGAGVRSTSISLRQCSLSVRSIKISEDSRKPKAYAENGAFDVGVLDSSSYRLADSRTSSNDSRRKTKIVCTIGPSSSSREMIWKLAEAGMNVARLNMSHGDHASHQITIDLVKEYNSLFVDKAIAIMLDTKGPEVRSGDVPQPIFLEEGQEFNFTIKRGVSLKDTVSVNYDDFVNDVEVGDILLVDGGMMSLAVKSKTSDLVKCVVIDGGELQSRRHLNVRGKSATLPSITDKDWEDIKFGVDNQVDFYAVSFVKDAKVVHELKNYLKTCSADISVIVKIESADSIKNLPSIISACDGAMVARGDLGAELPIEEVPLLQEEIIRRCRSIHKPVIVATNMLESMINHPTPTRAEVSDIAIAVREGADAIMLSGETAHGKFPLKAVNVMHTVALRTEASLPVRTSASRTTAYKGHMGQMFAFHASIMANTLSSPLIVFTRTGSMAVLLSHYRPSATIFAFTNQRRIMQRLALYQGVMPIYMEFSDDAEDTYARSLKLLQDENMLKEGQHVTLVQSGSQPIWREESTHLIQVRKIKIGG

SEQ ID NO: 11 - DNA, 1551 bp, Arabidopsis thaliana
tcgattaaaatctccgaagatagccgcaaacctaaagcttatgcagagaacggtgcttttgatgtgggagttttggattcttcatcatatagattggctgattcaagaacaagtagtaatgattcaaggaggaagactaagattgtgtgtacgattggaccgtcttcgagttctagggaaatgatttggaaactcgcggaagctggaatgaatgtggctcgtttgaatatgtctcatggtgatcatgcttctcatcagataactattgatttagttaaggagtataattctttgtttgttgacaaagctattgctattatgttggatacaaagggtcctgaggttcgaagcggggatgtaccgcagccgatatttcttgaagagggtcaagagtttaactttactatcaagagaggtgtttcgcttaaagacactgttagtgtaaattatgatgattttgtgaacgatgttgaagttggggatatacttttggtggatggtggaatgatgtcgttagctgttaaatcaaagacgagtgatttggtgaagtgtgtggttattgatggtggagagcttcaatctagacgtcacttgaatgttcgaggaaagagtgcgactcttccatccattacagacaaagattgggaagacataaaatttggagtggacaaccaagtcgatttctacgccgtctcctttgttaaggatgctaaagttgtccatgagttgaagaactatctcaaaacctgcagtgcagacatatcggtgattgtgaaaattgaaagtgcagactctataaagaatcttccttctatcatatctgcttgtgatggggcaatggttgctcgtggagatcttggagctgaacttcccattgaagaggtcccgttgttacaggaagaaataatcagaaggtgtagaagcattcataaaccagtgattgttgccacaaacatgctagagagtatgattaatcatccaacgcctacaagagctgaagtctctgacattgcaattgcagtacgtgaaggcgcagatgctatcatgctttctggtgaaaccgcacatggaaagtttccgctgaaagctgttaacgtaatgcatactgtggcgttgagaaccgaggcaagtctacctgtcagaacctcggcatcccgtaccactgcttacaagggtcacatgggccaaatgtttgcttttcatgcttctataatggcaaatacactgagctcaccgctaattgtatttacgagaaccggatccatggcagtgcttctaagccactaccgcccatctgcaacaattttcgccttcacaaaccagagaagaataatgcaaaggcttgctctttatcaaggtgtcatgcctatatatatggagttctcggatgatgcagaagatacatatgcccggtctctcaaactcttacaggacgagaatatgctcaaggaaggacaacatgtaactcttgtccaaagtggctcgcaacccatttggcgtgaagaatcaacacatctcatacaagtccgtaagataaagataggtggatga

SEQ ID NO: 12 - protein, 516 aa, Arabidopsis thaliana
SIKISEDSRKPKAYAENGAFDVGVLDSSSYRLADSRTSSNDSRRKTKIVCTIGPSSSSREMIWKLAEAGMNVARLNMSHGDHASHQITIDLVKEYNSLFVDKAIAIMLDTKGPEVRSGDVPQPIFLEEGQEFNFTIKRGVSLKDTVSVNYDDFVNDVEVGDILLVDGGMMSLAVKSKTSDLVKCVVIDGGELQSRRHLNVRGKSATLPSITDKDWEDIKFGVDNQVDFYAVSFVKDAKVVHELKNYLKTCSADISVIVKIESADSIKNLPSIISACDGAMVARGDLGAELPIEEVPLLQEEIIRRCRSIHKPVIVATNMLESMINHPTPTRAEVSDIAIAVREGADAIMLSGETAHGKFPLKAVNVMHTVALRTEASLPVRTSASRTTAYKGHMGQMFAFHASIMANTLSSPLIVFTRTGSMAVLLSHYRPSATIFAFTNQRRIMQRLALYQGVMPIYMEFSDDAEDTYARSLKLLQDENMLKEGQHVTLVQSGSQPIWREESTHLIQVRKIKIGG

SEQ ID NO: 13 - DNA, 1716 bp, Artificial sequence
  Codon optimized AtPK440 sequence for expression in Zea mays
atggccgcgtatgggcaaatctcctcgggtatgacagtcgatccacaagtactcagctcgtctcgcaatattggtgtttcgctctcacccctaagaaggacgttgatcggtgctggagtgcggtcaacttcgatttcccttcgccagtgtagccttagcgttaggtctatcaagatatcggaagatagccgcaagcccaaggcttacgccgagaacggtgcgtttgacgtgggggtattggactcgagttcctacagactggctgattctagaacaagctcaaatgattctcgacggaagactaagatcgtttgcactatcggcccaagtagctcgagccgtgagatgatatggaagctagcggaggctggaatgaacgtcgccagactcaatatgagccatggtgaccatgcttcccatcaaattaccatagacctggtcaaagagtacaatagtctcttcgttgataaggctatcgctattatgctggatactaaaggacctgaggtcagatccggtgacgtgcctcaaccgatattcttggaggagggccaagagtttaacttcacgatcaagcgtggtgtgtcactcaaagacacggtgagcgtcaactacgacgatttcgtcaatgacgtcgaagtgggtgacatacttctggtcgacgggggtatgatgtcacttgctgttaagtccaaaacgtccgacctcgtcaagtgcgtcgtgattgatggaggtgaacttcaatcccgtcgccacttgaatgtccgtggaaagtccgctacgttgccaagcataactgacaaggactgggaggatatcaagttcggagtggacaaccaagtggacttctacgccgtgagcttcgtgaaagatgcaaaggtggttcacgagctgaagaactacctcaagacctgctctgctgacatctccgttatcgtgaagatcgagagtgccgattctatcaagaacctgccaagcataatcagtgcgtgtgacggtgcgatggtagctagaggtgatctgggtgctgagttgccaatagaggaagtaccgctgcttcaagaggagatcatacgtcgctgccgtagtattcacaagcctgtgatagtcgctacgaacatgctcgagtctatgatcaatcaccccacaccaacgagggccgaagtatccgacattgccatcgctgtgagggagggagcagacgcgattatgctctctggcgaaactgcccacgggaagttccccttgaaagctgtcaacgttatgcacacggtggccttacgaaccgaagcttcactcccggtcagaacttctgcgagccgtaccacagcttataagggccacatgggtcagatgtttgcattccacgcgtctattatggcgaatacgctatcttcaccgctgatcgttttcacccgtactggcagtatggctgtgctactctcgcactaccggccgtctgccacaatctttgctttcacgaatcagagacgaataatgcaaaggctcgccctgtaccaaggtgtgatgcctatctacatggagttctccgatgacgctgaagacacctacgctcgctcgctgaagctactccaagatgagaacatgctcaaggaaggtcagcatgtgaccctcgtccagagcggaagtcagccgatctggcgtgaggaatcaacccacctcatccaagtccgaaagatcaagatcggaggttga

SEQ ID NO: 14 - protein, 571 aa, Arabidopsis thaliana; identical to SEQ ID NO: 10

SEQ ID NO: 15 - DNA, 1698 bp, Linum usipatissimum
atggcggctcaagtggtagctaccaaatccatccacacttctcttctctcccccgttgcttcttctgggtcgcttcaaaaccgtgtcaaaaaccttaaagcttcaaactttaccaccaatgtcggaggacttgctcgtagaaccaacccaactatttccgccgtaaagactgatgtagtcatccccgtctcacccgaagatgtcccaaagagggcggagaggtttacggagctgcagaaatttggggacacgtcagtgggggtgtggtctaagccaacggtgaagcgcaagacgaagatagtgtgcacaattggtccttctaccaacactagggagatgatatggaagctggctgaggcaggaatgaatgttgctaggttgaacatgtctcatggggatcatgcttcccaccagaaagtgattgacttggtcaaggagtataatgctcagtccaaggacaatgtcattgccattatgattgataccaagggtcctgaggttaggagtggtgacttgccacaaccgataatgttggcgcctggtcaggagttcactttcactattcgtagaggtgttgggactggtgattgtgttagtgtgaactatgatgatttcgtcaatgatgttgaagatggtgacatgcttctcgttgatggggggatgatgtctctggtcgtgaagtcaaagactgaagattcagtgaagtgtgaggttgttgatgggggagaactgaagtctaggcgtcatcttaacgttcgaggaaagagtgcaacattgccttccatcactgataaggattgggatgacataaagtttggagtgaacaacaaggttgatttctatgctgtttcattcgtcaaagatgcacaagtcgttcatgagttgaagaactatctcaagagctgcggtgcagatattcacgtgattgtaaaaatcgagagtgctgattctattcctaatttgcactcgataatcacagcgtcagatggggcaatggttgcacggggcgatcttggtgcagagctcccaattgaagaagttccacttcttcaggaagagataatccggttatgccggggcatgggaaaagctgttattgtggctacaaatatgttggaaagtatgattgttcatcctactccaaccagagcggaggtgtcagatatcgccattgctgttcgggaaggtgcagatgcggtgatgctttctggagaaactgctcacggaaagttcccattgaaggctgtaaaggttatgcatactgtctcgttacgcactgaagcaactttgtctagtgggccaatgccagttaatcttggacaagctttcaagaatcacatgagtgagatgtttgcataccatgcaaccatgatgtcgaacactcttgggacgtcaatcgttgtcttcaccagaactggcttcatggctgttttgcttagtcattatcgaccttcggggacaatatttgctttcactaatgacaaaacgatacaacagaggttggcagtctatcaaggagtatgtcccatttacctcgagttctcggacgatgctgaagaaacctttgctgatgccttaacgctacttaagaatcatggaatggttaagcaaggtgaagaggttgcactcgttcaaagtgggaaaaaacccatctggcgattccagtcgacccacaatattcaggtgcgtgaagtatag

SEQ ID NO: 16 - protein, 565 aa, Linum usipatissimum
MAAQVVATKSIHTSLLSPVASSGSLQNRVKNLKASNFTTNVGGLARRTNPTISAVKTDVVIPVSPEDVPKRAERFTELQKFGDTSVGVWSKPTVKRKTKIVCTIGPSTNTREMIWKLAEAGMNVARLNMSHGDHASHQKVIDLVKEYNAQSKDNVIAIMIDTKGPEVRSGDLPQPIMLAPGQEFTFTIRRGVGTGDCVSVNYDDFVNDVEDGDMLLVDGGMMSLVVKSKTEDSVKCEVVDGGELKSRRHLNVRGKSATLPSITDKDWDDIKFGVNNKVDFYAVSFVKDAQVVHELKNYLKSCGADIHVIVKIESADSIPNLHSIITASDGAMVARGDLGAELPIEEVPLLQEEIIRLCRGMGKAVIVATNMLESMIVHPTPTRAEVSDIAIAVREGADAVMLSGETAHGKFPLKAVKVMHTVSLRTEATLSSGPMPVNLGQAFKNHMSEMFAYHATMMSNTLGTSIVVFTRTGFMAVLLSHYRPSGTIFAFTNDKTIQQRLAVYQGVCPIYLEFSDDAEETFADALTLLKNHGMVKQGEEVALVQSGKKPIWRFQSTHNIQVREV

SEQ ID NO: 17 - DNA, 1698 bp, Artificial sequence
  Codon optimized LuPK001 sequence for expression in Zea mays
atggccgcccaggtggtggccaccaagagcatccacaccagcctgctgagcccggtggccagcagcggcagcctgcagaacagggtgaagaacctgaaggccagcaacttcaccaccaacgtgggcggcctggccaggaggaccaacccgaccatcagcgccgtgaagaccgacgtggtgatcccggtgagcccggaggacgtgccgaagagggccgagaggttcaccgagctgcagaagttcggcgacaccagcgtgggcgtgtggagcaagccgaccgtgaagaggaagaccaagatcgtgtgcaccatcggcccgagcaccaacaccagggagatgatctggaagctggccgaggccggcatgaacgtggccaggctgaacatgagccacggcgaccacgccagccaccagaaggtgatcgacctggtgaaggagtacaacgcccagagcaaggacaacgtgatcgccatcatgatcgacaccaagggcccggaggtgaggagcggcgacctgccgcagccgatcatgctggccccgggccaggagttcaccttcaccatcaggaggggcgtgggcaccggcgactgcgtgagcgtgaactacgacgacttcgtgaacgacgtggaggacggcgacatgctgctggtggacggcggcatgatgagcctggtggtgaagagcaagaccgaggacagcgtgaagtgcgaggtggtggacggcggcgagctgaagagcaggaggcacctgaacgtgaggggcaagagcgccaccctgccgagtatcaccgacaaggactgggacgatatcaagttcggcgtgaacaacaaggtggacttctacgccgtgagcttcgtgaaggacgcccaggtggtgcacgagctgaagaactacctgaagagctgcggcgccgacatccacgtgatcgtgaagatcgagagcgccgacagtatcccgaacctgcacagtataatcaccgccagcgacggcgcgatggtggccaggggcgacctgggcgccgagctgccgatcgaggaggtgccgctgctgcaggaggagattatcaggctgtgcagggggatgggcaaggccgtgatcgtggccaccaatatgctggagagtatgatcgtgcacccgaccccgaccagggccgaggtgagcgatatcgcgatcgccgtgagggagggcgccgacgccgtgatgctgagcggcgagaccgcccacggcaagttcccgctgaaggccgtgaaggtgatgcacaccgtgagcctgaggaccgaggccaccctgagcagcggcccgatgccggtgaacctgggccaggccttcaagaaccatatgagcgagatgttcgcctaccacgccaccatgatgagcaacaccctgggcaccagcatcgtggtgttcaccaggaccggcttcatggccgtgctgctgagccactacaggccgagcggcaccatcttcgccttcaccaacgacaagaccatccagcagaggctggccgtgtaccagggcgtgtgcccgatctacctggagttcagcgacgacgccgaggagaccttcgccgacgccctgaccctgctgaagaaccacggcatggtgaagcagggcgaggaggtggccctggtgcagagcggcaagaagccgatctggaggttccagagcacccacaatatccaggtgagggaggtgtga

SEQ ID NO: 18 - protein, 565 aa, Linum usipatissimum; identical to SEQ ID NO: 16

SEQ ID NO: 19 - DNA, 1740 bp, Arabidopsis thaliana
atggctcaagtggttgctaccaggtcaattcaaggctcgatgttatctcccaacggtggatctgtgtctacaagatccgagaagctattgaaaccagcgagttttgcagtgaaggttcttggcaacgaagcaaagagaagtggaagagtctctgtaagaagcagaagagtggttgatactactgtgagatccgctcgtgttgagactgaagtcattcctgtttctcctgaagatgtgcctaacagagaggagcagcttgagaggttgttggaaatgcagcagtttggtgatacatcggtagggatgtggtcgaagccgacagtgaggaggaagacaaagattgtttgcaccgttggtccgtcgaccaacacacgagaaatgatatggaaattggctgaagctgggatgaatgttgctaggatgaatatgtctcatggagatcatgcttcacataagaaggttattgatttggttaaagaatacaatgcacaaactaaagacaacactattgctatcatgcttgacaccaagggtccggaagttaggagtggagatttacctcagccaattatgttagatcctggtcaagagtttacctttacaattgagagaggagtcagcacaccaagttgtgtcagtgttaactatgatgatttcgttaatgacgtggaagcgggtgacatgcttcttgttgatggtggtatgatgtcgtttatggtgaagtcaaagaccaaagactctgtcaaatgtgaagttgttgatggtggagaacttaagtcaaggagacacctgaatgtccgaggaaagagtgcaactttaccttcaatcactgagaaggactgggaggatattaaatttggagtggagaacaaagttgacttttatgcagtttcctttgtcaaagatgctcaagttgtacacgagttgaagaaataccttcaaaatagtggtgctgatatacacgtgatagtgaaaattgagagtgcagactccatacctaacttgcactccattatcacagcaccagatggggcaatggttgcaagaggtgatcttggtgcagagcttccaattgaagaagtccccattcttcaggaggagatcattaacctgtgccgtagtatgggaaaagctgttattgttgcgactaacatgcttgagagtatgatagttcatccaactccaacccgggcagaggtctcagacattgctatcgctgttagagaaggtgctgatgcggtaatgctttcaggagaaactgctcacggaaagttcccattgaaagctgctggagtgatgcacactgttgcattgcgaacagaagcaaccattactagcggtgaaatgccacctaatcttggtcaagccttcaagaaccatatgagtgagatgtttgcataccatgcaaccatgatgtcaaacacacttggaacttcaactgttgtcttcaccagaaccggtttcatggccatattgttaagtcactatcgtccttccggcacaatctatgccttcacaaatgagaaaaaaatacaacaaagattagctttgtatcaaggtgtatgccccatatatatggagttcacagatgatgcagaagaaacttttgctaatgctttggctacattactgaaacaaggaatggtgaagaagggagaggaaatagcaatcgtacagagcggtacacagccaatctggcgatctcaatcgacacataacatccaagtccgcaaggtttaa

SEQ ID NO: 20 - protein, 579 aa, Arabidopsis thaliana
MAQVVATRSIQGSMLSPNGGSVSTRSEKLLKPASFAVKVLGNEAKRSGRVSVRSRRVVDTTVRSARVETEVIPVSPEDVPNREEQLERLLEMQQFGDTSVGMWSKPTVRRKTKIVCTVGPSTNTREMIWKLAEAGMNVARMNMSHGDHASHKKVIDLVKEYNAQTKDNTIAIMLDTKGPEVRSGDLPQPIMLDPGQEFTFTIERGVSTPSCVSVNYDDFVNDVEAGDMLLVDGGMMSFMVKSKTKDSVKCEVVDGGELKSRRHLNVRGKSATLPSITEKDWEDIKFGVENKVDFYAVSFVKDAQVVHELKKYLQNSGADIHVIVKIESADSIPNLHSIITAPDGAMVARGDLGAELPIEEVPILQEEIINLCRSMGKAVIVATNMLESMIVHPTPTRAEVSDIAIAVREGADAVMLSGETAHGKFPLKAAGVMHTVALRTEATITSGEMPPNLGQAFKNHMSEMFAYHATMMSNTLGTSTVVFTRTGFMAILLSHYRPSGTIYAFTNEKKIQQRLALYQGVCPIYMEFTDDAEETFANALATLLKQGMVKKGEEIAIVQSGTQPIWRSQSTHNIQVRKV

SEQ ID NO: 21 - DNA, 1740 bp, Arabidopsis thaliana
atggctcaagtggttgctaccaggtcaattcaaggctcgatgttatctcccaacggtggatctgtgtctacaagatccgagaagctattgaaaccagcgagttttgcagtgaaggttcttggcaacgaagcaaagagaagtggaagagtctctgtaagaagcagaagagtggttgatactactgtgagatccgctcgtgttgagactgaagtcattcctgtttctcctgaagatgtgcctaacagagaggagcagcttgagaggttgttggaaatgcagcagtttggtgatacatcggtagggatgtggtcgaagccgacagtgaggaggaagacaaagattgtttgcaccgttggtccgtcgaccaacacacgagaaatgatatggaaattggctgaagctgggatgaatgttgctaggatgaatatgtctcatggagatcatgcttcacataagaaggttattgatttggttaaagaatacaatgcacaaactaaagacaacactattgctatcatgcttgacaccaagggtccggaagttaggagtggagatttacctcagccaattatgttagatcctggtcaagagtttacctttacaattgagagaggagtcagcacaccaagttgtgtcagtgttaactatgatgatttcgttaatgacgtggaagcgggtgacatgcttcttgttgatggtggtatgatgtcgtttatggtgaagtcaaagaccaaagactctgtcaaatgtgaagttgttgatggtggagaacttaagtcaaggagacacctgaatgtccgaggaaagagtgcaactttaccttcaatcactgagaaggactgggaggatattaaatttggagtggagaacaaagttgacttttatgcagtttcctttgtcaaagatgctcaagttgtacacgagttgaagaaataccttcaaaatagtggtgctgatatacacgtgatagtgaaaattgagagtgcagactccatacctaacttgcactccattatcacagcatcagatggggcaatggttgcaagaggtgatcttggtgcagagcttccaattgaagaagtccccattcttcaggaggagatcattaacctgtgccgtagtatgggaaaagctgttattgttgcggctaacatgcttgagagtatgatagttcatccaactccaacccgggcagaggtctcagacattgctatcgctgttagagaaggtgctgatgcggtaatgctttcaggagaaactgctcacggaaagttcccattgaaagctgctggagtgatgcacactgttgcattgcgaacagaagcaaccattactagcggtgaaatgccacctaatcttggtcaagccttcaagaaccatatgagtgagatgtttgcataccatgcaaccatgatgtcaaacacacttggaacttcaactgttgtcttcaccagaaccggtttcatggccatattgttaagtcactatcgtccttccggcacaatctatgccttcacaaatgagaaaaaaatacaacaaagattagctttgtatcaaggtgtatgccccatatatatggagttcacagatgatgcagaagaaacttttgctaatgctttggctacattactgaaacaaggaatggtgaagaagggagaggaaatagcaatcgtacagagcggtacacagccaatctggcgatctcaatcgacacataacatccaagtccgcaaggtttaa

SEQ ID NO: 22 - protein, 579 aa, Arabidopsis thaliana
MAQVVATRSIQGSMLSPNGGSVSTRSEKLLKPASFAVKVLGNEAKRSGRVSVRSRRVVDTTVRSARVETEVIPVSPEDVPNREEQLERLLEMQQFGDTSVGMWSKPTVRRKTKIVCTVGPSTNTREMIWKLAEAGMNVARMNMSHGDHASHKKVIDLVKEYNAQTKDNTIAIMLDTKGPEVRSGDLPQPIMLDPGQEFTFTIERGVSTPSCVSVNYDDFVNDVEAGDMLLVDGGMMSFMVKSKTKDSVKCEVVDGGELKSRRHLNVRGKSATLPSITEKDWEDIKFGVENKVDFYAVSFVKDAQVVHELKKYLQNSGADIHVIVKIESADSIPNLHSIITASDGAMVARGDLGAELPIEEVPILQEEIINLCRSMGKAVIVAANMLESMIVHPTPTRAEVSDIAIAVREGADAVMLSGETAHGKFPLKAAGVMHTVALRTEATITSGEMPPNLGQAFKNHMSEMFAYHATMMSNTLGTSTVVFTRTGFMAILLSHYRPSGTIYAFTNEKKIQQRLALYQGVCPIYMEFTDDAEETFANALATLLKQGMVKKGEEIAIVQSGTQPIWRSQSTHNIQVRKV

SEQ ID NO: 23 - DNA, 1740 bp, Arabidopsis thaliana
atggctcaagttgttgctaccaggtcaattcaaggctcgatgttgtgtcccaacggtggatctgtgtctacaagatccgagaagctattgaagccggcgagttttgcagtgaaggttcttggaaacgaagctaagagaagtggaagagtctctgttagaagtagaagagtggttgatactacagtgagatctgctcgtgttgagactgaagtgattcctgtttctcctgaagatgtgcctaacagagaggagcagctcgagaggttgttggaaatgcagcagtttggtgatacatcggtagggatgtggtcgaaaccgacagtgaggaggaagacaaagatcgtttgcaccgttggtccgtcgaccaacacacgagaaatgatatggaaattggctgaagctgggatgaatgttgctaggatgaatatgtctcatggagatcatgcttcacataagaaggttattgatttggttaaagagtacaatgcacaaacgaaagacaacactattgctatcatgcttgataccaagggtccggaagttaggagtggagatttaccacaaccaattatgttagatccaggtcaagagtttacttttactattgagagaggagtcagtacaccaagttgtgtcagtgttaactatgatgatttcgtcaatgacgtggaagccggtgacatgcttcttgttgatggtggtatgatgtcatttatggtgaagtctaagaccaaagactctgtcaaatgtgaagttgttgatggtggagaacttaagtcaaggagacatttgaatgtccgaggaaagagtgcaacattaccttcaatcactgagaaggattgggaagatattaaatttggagtggagaataaagttgacttttatgcagtttcctttgtcaaagatgctcaagtggtacacgaattgaagaaataccttcaaaattctggtgctgatatacatgtgatagtgaaaattgaaagtgcagactccatacctaacttgcattccattatcacagcatcagatggggcaatggttgctagaggtgatcttggtgcagagcttccaattgaagaagtccccattcttcaggaggagatcattaacctatgccggagcatgggaaaagctgtaattgttgcgactaacatgcttgagagtatgatagttcatccaactccaacccgggcagaggtctcagacattgctatcgctgttagagaaggtgctgatgcagttatgctttcaggagaaactgctcacggaaagttcccattgaaagctgctggggtgatgcacacggttgcattgcgaacagaagccaccattactagtggtgaaatgccacctaatcttggtcaagccttcaagaaccatatgagcgagatgtttgcatatcatgcaaccatgatgtcaaacacacttggaacttcaactgttgtcttcaccagaactggtttcatggccattctgctaagtcactatcgtccttccggcacaatctatgccttcacaaatgagaaaaaaatacaacaaagattagcattgtatcaaggtgtatgccccatatatatggagttttcagatgatgcagaagagacttttgctaatgccttggctacattactgaaacaaggaatggtgaagaagggagaggaaatagcaatcgtacagagcggtacacagccaatctggcgatctcaatcgacgcataacatccaagtccgcaaggtttaa

SEQ ID NO: 24 - protein, 579 aa, Arabidopsis thaliana
MAQVVATRSIQGSMLCPNGGSVSTRSEKLLKPASFAVKVLGNEAKRSGRVSVRSRRVVDTTVRSARVETEVIPVSPEDVPNREEQLERLLEMQQFGDTSVGMWSKPTVRRKTKIVCTVGPSTNTREMIWKLAEAGMNVARMNMSHGDHASHKKVIDLVKEYNAQTKDNTIAIMLDTKGPEVRSGDLPQPIMLDPGQEFTFTIERGVSTPSCVSVNYDDFVNDVEAGDMLLVDGGMMSFMVKSKTKDSVKCEVVDGGELKSRRHLNVRGKSATLPSITEKDWEDIKFGVENKVDFYAVSFVKDAQVVHELKKYLQNSGADIHVIVKIESADSIPNLHSIITASDGAMVARGDLGAELPIEEVPILQEEIINLCRSMGKAVIVATNMLESMIVHPTPTRAEVSDIAIAVREGADAVMLSGETAHGKFPLKAAGVMHTVALRTEATITSGEMPPNLGQAFKNHMSEMFAYHATMMSNTLGTSTVVFTRTGFMAILLSHYRPSGTIYAFTNEKKIQQRLALYQGVCPIYMEFSDDAEETFANALATLLKQGMVKKGEEIAIVQSGTQPIWRSQSTHNIQVRKV

SEQ ID NO: 25 - DNA, 1743 bp, Artificial sequence
  protein kinase homolog
atggctcaggtcgttgctacaaggtcgattcaaggctctatgttgagtcccaacggtggatctgtttccacgagatccgacaagcttctgaagccggcgagtttcgcagtgaaggttcttggcaacgaatccaagaagagcggaagagtgtccgtaagaggaggaagaaaggttgataccactgtgagatccgctcgtgtggagaccgaagtcattccagtgtctcccgaggatgttccaaacagagaggagcaactggagcggtttttggaaatgcagaagtttagtgacacatcggtagggatgtggtcgaaaccgacagtgaggaggaagactaagattgtgtgcaccgttggtccttctaccaacacacgagagatgatatggaaactggctgaagctgggatgaatgttgctaggatgaacatgtctcatggggatcatgcttctcataagaaggttattgatttggtcaaagagtacaatgcgcaatctaaagataacaccattgctatcatgcttgataccaagggtccagaagttaggagtggagatttaccccagccgattatgttagaccctggtcaagagtttacttttacaattgagagaggagtcagcaccccaagttgtgtcagtgttaactatgatgattttgtcaacgatgtggaggcgggagacatgctccttgttgatggtggtatgatgtcgtttatggtgaagtctaagactaaagagactgtcatatgtgaggttgttgatggtggagaactaaagtcaaggagacacttgaatgtccgagggaaaagtgcaacattaccttcaatcactgagaaggattgggaggatattaagttcggagtggagaacaaagttgacttctatgcggtttcttttgtcaaagatgcacaagtggtgcatgaactgaagaattacctccaaggttgtggtgctgatattcacgtgatagtaaaaattgaaagcgcagactccatacctaacttgcattccattatcaccgcatcagatggggcaatggttgcaagaggtgatcttggtgctgagcttcctattgaggaagtacccattcttcaggagaggatcattaacctatgccgtagcatgggaaaagctgttattgttgcaactaacatgcttgagagtatgatagttcatccgactccaacccgagcggaggtttctgatattgctatagctgttagagaaggtgctgatgcagtcatgctttcaggagaaactgctcacggaaagttcccactgaaagctgctggagtgatgcatacagtcgcacttcgaacagaagcaaccattactactagtactgaaatgccacctaatcttggtcaagccttcaagaaccatatgagtgagatgtttgcataccatgcaaccatgatgtcaaacacgcttggaacttcaactgttgtcttcaccagaactggtttcatggccatacttttaagtcactatcgcccttctggcaccatctacgccttcacaaaaaaaaaaaaaatacaacaaagattagctttgtatcaaggtgtatgccccatatatatggagttcacagatgatgcagaagaaacttttgctaatgctttggctacattactgaaacaaggaatggtgaagaagggagaggaaatagcaatcgtacagagcggtacacagccaatctggcgatctcaatcgacacataacatccaagtccgcaaggtttaa

SEQ ID NO: 26 - protein, 580 aa, Artificial sequence
  protein kinase homolog
MAQVVATRSIQGSMLSPNGGSVSTRSDKLLKPASFAVKVLGNESKKSGRVSVRGGRKVDTTVRSARVETEVIPVSPEDVPNREEQLERFLEMQKFSDTSVGMWSKPTVRRKTKIVCTVGPSTNTREMIWKLAEAGMNVARMNMSHGDHASHKKVIDLVKEYNAQSKDNTIAIMLDTKGPEVRSGDLPQPIMLDPGQEFTFTIERGVSTPSCVSVNYDDFVNDVEAGDMLLVDGGMMSFMVKSKTKETVICEVVDGGELKSRRHLNVRGKSATLPSITEKDWEDIKFGVENKVDFYAVSFVKDAQVVHELKNYLQGCGADIHVIVKIESADSIPNLHSIITASDGAMVARGDLGAELPIEEVPILQERIINLCRSMGKAVIVATNMLESMIVHPTPTRAEVSDIAIAVREGADAVMLSGETAHGKFPLKAAGVMHTVALRTEATITTSTEMPPNLGQAFKNHMSEMFAYHATMMSNTLGTSTVVFTRTGFMAILLSHYRPSGTIYAFTKKKKIQQRLALYQGVCPIYMEFTDDAEETFANALATLLKQGMVKKGEEIAIVQSGTQPIWRSQSTHNIQVRKV

SEQ ID NO: 27 - DNA, 1743 bp, Brassica napus
atggctcaggtcgttgctacaaggtcgattcaaggctcgatgttgagtcccaacggtggatctgtttccacgagatccgacaagcttctgaagccggcgagtttcgcagtgaaggttcttggcaacgaatccaagaagagcggaagagtgtccgtaagaggaggaagaaaggttgataccactgtgagatccgctcgtgtggagaccgaagtcattccagtgtctcccgaggatgttccaaacagagaggagcaactggagcggtttttggaaatgcagaagtttagtgacacatcggtagggatgtggtcgaaaccgacagtgaggaggaagactaagattgtgtgcaccgttggtccttctaccaacacacgagagatgatatggaaactagctgaagctgggatgaatgttgcaaggatgaacatgtctcatggggatcatgcttctcataagaaggttattgatttggtcaaagagtacaatgcgcagtctaaggacaacaccattgctatcatgctggatactaagggtccagaagttaggagtggagatttaccccagccgattatgttagaccctggtcaagagtttacttttacaattgagagaggagtcagcacaccaagctgtgtcagtgttaactatgatgattttgtcaacgatgtggaggccggagacatgctccttgttgatggtggtatgatgtcgtttatggtgaagtctaagactaaagagactgtcatatgtgaggttgttgatggtggagagctaaagtcaaggagacacttgaatgtccgaaggaaaagtgcaacattaccttcaatcactgagaaggattgggaggatattaagttcggagtggagaacaaagttgacttctatgctgtttcttttgtcaaagatgcacaagtggtgcatgaactgaagaattacctccaaggttgtggtgctgatattcacgtgatagtaaaaattgaaagcgcagactccatacctaacttgcattccattatcaccgcatcagatggggcaatggttgcaagaggtgatcttggtgcagagcttcctattgaagaagtacccattcttcaggaaaagatcattaacctatgccgtagcatgggaaaagctgttattgttgcaactaacatgcttgagagtatgatagttcatccgactccaacccgagcggaggtttctgatattgctatagctgttagagaaggtgctgatgcagtcatgctttcaggagaaactgctcacggaaagttcccattgaaagctgctggagtgatgcatacagttgcactgcgaacagaagcaaccattactactagtactgaaatgccacctaatcttggtcaagccttcaagaaccatatgagtgagatgtttgcataccatgcaaccatgatgtcaaacacacttggaacttcaactgttgtcttcacaagaactggtttcatggccatactactaagtcactatcgcccttccggcacaatctacgccttcacgaacgagaaaaaaatacagcaaagattagccttgtatcaaggtgtatgccccatatatatggagttctcagatgatgcagaagacactttcactaaagctttggctacactactgaaacaaggaatggtgaagaagggagaggaaatagcgattgtacagagcgggtcacaaccaatctggcggtctcaatcgactcataacatccaagtccgcaaggtgtaa

SEQ ID NO: 28 - protein, 580 aa, Brassica napus
MAQVVATRSIQGSMLSPNGGSVSTRSDKLLKPASFAVKVLGNESKKSGRVSVRGGRKVDTTVRSARVETEVIPVSPEDVPNREEQLERFLEMQKFSDTSVGMWSKPTVRRKTKIVCTVGPSTNTREMIWKLAEAGMNVARMNMSHGDHASHKKVIDLVKEYNAQSKDNTIAIMLDTKGPEVRSGDLPQPIMLDPGQEFTFTIERGVSTPSCVSVNYDDFVNDVEAGDMLLVDGGMMSFMVKSKTKETVICEVVDGGELKSRRHLNVRRKSATLPSITEKDWEDIKFGVENKVDFYAVSFVKDAQVVHELKNYLQGCGADIHVIVKIESADSIPNLHSIITASDGAMVARGDLGAELPIEEVPILQEKIINLCRSMGKAVIVATNMLESMIVHPTPTRAEVSDIAIAVREGADAVMLSGETAHGKFPLKAAGVMHTVALRTEATITTSTEMPPNLGQAFKNHMSEMFAYHATMMSNTLGTSTVVFTRTGFMAILLSHYRPSGTIYAFTNEKKIQQRLALYQGVCPIYMEFSDDAEDTFTKALATLLKQGMVKKGEEIAIVQSGSQPIWRSQSTHNIQVRKV

SEQ ID NO: 29 - DNA, 1743 bp, Brassica napus
atggctcaggtcgttgctacaaggtcgattcaaggctcgatgttgagtcccaacggtggatctgtttccacgagatccgacaagcttctgaagccggcgagtttcgcagtgaaggttcttggcaacgaatccaagaagagcggaagagtgtccgtaagaggaggaagaaaggttgataccactgtgagatccgctcgtgtggagaccgaagtcattccagtgtctcccgaggatgttccaaacagagaggagcaactggagcggtttttggaaatgcagaagtttagtgacacatcggtagggatgtggtcgaaaccgacagtgaggaggaagactaagattgtgtgcaccgttggtccttctaccaacacacgagagatgatatggaaactagctgaagctgggatgaatgttgcaaggatgaacatgtctcatggggatcatgcttctcataagaaggttattgatttggtcaaagagtacaatgcgcagtctaaggacaacaccattgctatcatgctggatactaagggtccagaagttaggagtggagatttaccccagccgattatgttagaccctggtcaagagtttacttttacaattgagagaggagtcagcacaccaagctgtgtcagtgttaactatgatgattttgtcaacgatgtggaggccggagacatgctccttgttgatggtggtatgatgtcgtttatggtgaagtctaagactaaagagactgtcatatgtgaggttgttgatggtggagagcttaagtcaaggagacacttgaatgtccgagggaaaagtgcaacattaccgtcaatcactgagaaggattgggaggatattaagttcggagtggagaacaaagttgacttttatgcagtttcttttgtcaaagatgcacaagtggtacacgaactcaagaattacctcaaaggttgtggtgctgatattcacgtgatagtaaaaattgaaagcgcagactccatacctaacttgaattccattatcaccgcatcagatggggcaatggttgcaagaggtgatcttggtgcagagcttcctattgaagaagtacccattcttcaggagaggatcattaacctatgccgtagcatgggaaaagctgttattgttgcaactaacatgcttgagagtatgatagttcatccgactccaacccgagcggaggtttctgatattgctatagctgttagagaaggtgctgatgcagtcatgctttcaggagaaactgctcacggaaagttcccactgaaagctgctggagtgatgcatacagtcgcactgcgaacagaagcaaccattactactagtactgaaatgccacctaatcttggtcaagccttcaagaaccatatgagtgagatgtttgcataccatgcaaccatgatgtcaaacacgcttggaacttcaactgttgtcttcaccagaactggtttcatggccatacttttaagtcactatcgcccttctggcaccatctacgccttcacgaatgagaaaaaaatacagcaaagattagccttgtatcaaggggtgtgccccatatatatggagttctcagatgatgcagaggacactttcactaaagctttggctacactactgaaacaaggaatggtgaagaagggagaggaaatagcgattgtacagagcgggtcacaaccaatctggcggtctcaatcgactcataacatccaagtccgcaaggtgtaa

SEQ ID NO: 30 - protein, 580 aa, Brassica napus
MAQVVATRSIQGSMLSPNGGSVSTRSDKLLKPASFAVKVLGNESKKSGRVSVRGGRKVDTTVRSARVETEVIPVSPEDVPNREEQLERFLEMQKFSDTSVGMWSKPTVRRKTKIVCTVGPSTNTREMIWKLAEAGMNVARMNMSHGDHASHKKVIDLVKEYNAQSKDNTIAIMLDTKGPEVRSGDLPQPIMLDPGQEFTFTIERGVSTPSCVSVNYDDFVNDVEAGDMLLVDGGMMSFMVKSKTKETVICEVVDGGELKSRRHLNVRGKSATLPSITEKDWEDIKFGVENKVDFYAVSFVKDAQVVHELKNYLKGCGADIHVIVKIESADSIPNLNSIITASDGAMVARGDLGAELPIEEVPILQERIINLCRSMGKAVIVATNMLESMIVHPTPTRAEVSDIAIAVREGADAVMLSGETAHGKFPLKAAGVMHTVALRTEATITTSTEMPPNLGQAFKNHMSEMFAYHATMMSNTLGTSTVVFTRTGFMAILLSHYRPSGTIYAFTNEKKIQQRLALYQGVCPIYMEFSDDAEDTFTKALATLLKQGMVKKGEEIAIVQSGSQPIWRSQSTHNIQVRKV

SEQ ID NO: 31 - DNA, 1743 bp, Ricinus communis
atggctcaagttgtggctaccagatcgattcacacttcattgctgtgtcctacctctggatcctcactgcaagaccgggcagataagctaaagccttcaagttttgcgtcaaagttactgtcacgcgaagacaacaagagaaataagaacagcagccttacaatttctcgcagaaacactcaaatccaagctgctaacagatccacacgtgtcgaaactgaagttattcctgtatcgcctgaggatgtaccgcagagagaggagcaggtattgcatttacagcaattaggcgacacatcagtgagtatgtggtccaagcctgtagttagacggaagacaaagattgtatgcaccataggtccatcaacaaacacgagggagatgatttggaagctggctgaagcaggaatgaacgtagctcgactgaatatgtctcatggagaccatgcatctcatcagaaagttatagatttagttaaagaatataatgcacagtccaaagataatgtcattgctatcatgcttgacactaagggtcctgaagttaggagtggcgacttgcctcaaccgatcatgttatcacctggacaggaatttacttttacaattcgtaggggggttggcactgctgattgcgttagtgttaactatgatgattttgttaatgatgtagaagttggtgacatgcttcttgttgatggtggtatgatgtcacttctggtgaagtccaagacagaagattcagtgaggtgtgaagtaattgatggaggagaactaaagtctaggcgtcatttgaatgttagaggaaaaagcgcgacactgccttccatcactgaaaaggattgggatgacataaaatttggagtggacaataaggtagacttctatgcagtttcctttgttaaagatgcacaggttgttcatgaattaaagaattatttgcaaggctgtggtgcagacatacatgtgattgtgaaaattgaaagtgcagattctatcccaaatctgcattcaataatcacagcatctgatggggcaatggttgcaagaggagaccttggtgcagagcttcctatcgaggaggttccactcttgcaggaagaaataatcagactgtgtcggagtatggggaaagctgttattgtggcaacaaatatgctggaaagcatgatagttcatccaactccaacccgagccgaggtatctgacattgctattgctgttcgggagggttctgatgcagtcatgctttctggagaaactgctcatgggaagttcccattgaaagctgtgaaagtaatgcatactgttgcattacgaactgaagcaaccatagttggtggtacaatgccaccaaatcttggacaagccttcaagaaccacatgagcgagatgtttgcatatcacgcaaccatgatgtcaaacacacttggaacctcaattgttgtctttaccaggacaggcttcatggctatattattgagccattatcgaccttctggcactatttttgcattcacaaatgagaagagaatacaacagagactggctctataccaaggagtatgtcccatatacatgcaattttcagatgatgctgaagaaacctttgcaaatgccttatcagtgctcaagaaccaagggatggtaaaggaaggagaggaagttgctcttgttcagagtggcagacagccaatctggcgattccaatctactcacaacattcaggtcaggaaagtgtag

SEQ ID NO: 32 - protein, 580 aa, Ricinus communis
MAQVVATRSIHTSLLCPTSGSSLQDRADKLKPSSFASKLLSREDNKRNKNSSLTISRRNTQIQAANRSTRVETEVIPVSPEDVPQREEQVLHLQQLGDTSVSMWSKPVVRRKTKIVCTIGPSTNTREMIWKLAEAGMNVARLNMSHGDHASHQKVIDLVKEYNAQSKDNVIAIMLDTKGPEVRSGDLPQPIMLSPGQEFTFTIRRGVGTADCVSVNYDDFVNDVEVGDMLLVDGGMMSLLVKSKTEDSVRCEVIDGGELKSRRHLNVRGKSATLPSITEKDWDDIKFGVDNKVDFYAVSFVKDAQVVHELKNYLQGCGADIHVIVKIESADSIPNLHSIITASDGAMVARGDLGAELPIEEVPLLQEEIIRLCRSMGKAVIVATNMLESMIVHPTPTRAEVSDIAIAVREGSDAVMLSGETAHGKFPLKAVKVMHTVALRTEATIVGGTMPPNLGQAFKNHMSEMFAYHATMMSNTLGTSIVVFTRTGFMAILLSHYRPSGTIFAFTNEKRIQQRLALYQGVCPIYMQFSDDAEETFANALSVLKNQGMVKEGEEVALVQSGRQPIWRFQSTHNIQVRKV

SEQ ID NO: 33 - DNA, 1734 bp, Vitis vinifera
atggctcaggtggtggcgactcgcgcgattcagagctcgattctgtgccctagctctggatccgtgcatgagcgatttgagaagctgaagccctccggtttcgctgcgaaagtgttggctcgcgaagagcggaggagccggagattggcttggaggggcggtccaattgcggcggcgaagagatctgtgggagctgagacggaggttgttccggtcacaccagaggatgcgaagaacggagaggagcaatatcatcttttacggggaattcaacagcttggtgagacatctgttggtatgtggtctaagccaacggttagacgcaagacaaagattgtttgcacaattggtccatccaccaacacacgggaaatgatatggaagctggctgaggctggaatgaatgtcgcccgcctgaatatgtctcatggagatcatgcatctcatcagaaggttattgatttggtaaaagagtataatgcacaatccaaagataatgtcattgcaatcatgcttgataccaagggccctgaggtcaggagtggggacttgccccagccaatcatgttaaaaagtgggcaggaattcaccttcacaattcaaagaggcgttgggacagcagattgtgttagtgttaactatgatgattttgtcaatgatgtagaaatgggcgacatgcttctcgtggatggtggtatgatgtcattaatggtcaagtccaagactggagattcagtgaaatgtgaagttgttgatggtggagaactcaagtctagaaggcatctaaatgttcgaggaaaaagtgcaacactgccatcaattactgaaaaggactgggatgatatcaagtttggtgttgacaataaagtggacttttatgcagtctcctttgttaaagatgcaaaagtagtccatgaattgaagaactatctgaaaagctgtaatgcagatatccatgtcattgttaaaattgaaagtgccgactccattcccaatctacattcaattattaccgcatctgatggggcaatggttgctagaggggatcttggtgccgagcttcctattgaggaggtcccattgctacaggaagagataatcaggatatgtcgtagcatgggaaaagctgttattgtagcaaccaatatgctggaaagcatgattgttcacccaacaccaacccgagcagaggtatcagacattgccattgctgtccgagagggtgctgatgcagttatgctttctggagaaactgctcatggaaagtttcccttgaaagctgtgaaagtcatgcatacagtttccttaagaactgaagcaaccttggtcggtagcccaatgccaccaaatcttggtcaggctttcaagaaccatatgagcgaaatgtttgctttccatgcaaccatgatgtccaatactctcagtacttcaatagttgttttcactagaactggtttcatggctatccttctgagccattatcgaccttctggcaccatatttgcctttacaaatgaggagagagtacaacagagactagccgtgtaccaaggggtatgtcccatatacatgcagttctcagacgatgccgaagaaacctttgcaaatgccttgactttgttgcagaagcaagggatggtgaaggaaggagaagaggtggctcttgttcagagtggcaggcagccgatctggcggttccaatccacacacaatatccaggtcaggaaagtttaa

SEQ ID NO: 34 - protein, 577 aa, Vitis vinifera
MAQVVATRAIQSSILCPSSGSVHERFEKLKPSGFAAKVLAREERRSRRLAWRGGPIAAAKRSVGAETEVVPVTPEDAKNGEEQYHLLRGIQQLGETSVGMWSKPTVRRKTKIVCTIGPSTNTREMIWKLAEAGMNVARLNMSHGDHASHQKVIDLVKEYNAQSKDNVIAIMLDTKGPEVRSGDLPQPIMLKSGQEFTFTIQRGVGTADCVSVNYDDFVNDVEMGDMLLVDGGMMSLMVKSKTGDSVKCEVVDGGELKSRRHLNVRGKSATLPSITEKDWDDIKFGVDNKVDFYAVSFVKDAKVVHELKNYLKSCNADIHVIVKIESADSIPNLHSIITASDGAMVARGDLGAELPIEEVPLLQEEIIRICRSMGKAVIVATNMLESMIVHPTPTRAEVSDIAIAVREGADAVMLSGETAHGKFPLKAVKVMHTVSLRTEATLVGSPMPPNLGQAFKNHMSEMFAFHATMMSNTLSTSIVVFTRTGFMAILLSHYRPSGTIFAFTNEERVQQRLAVYQGVCPIYMQFSDDAEETFANALTLLQKQGMVKEGEEVALVQSGRQPIWRFQSTHNIQVRKV

SEQ ID NO: 35 - DNA, 1731 bp, Vitis vinifera
atggctcaggtggtggcgactcgcgcgattcagagctcgattctgtgccctagctctggatccgtgcatgagcgatttgagaagctgaagccctccggtttcgctgcgaaagtgttggctcgcgaagagcggaggagccggagattggcttggaggggcggtccaattgcggcggcgaagagatctgtgggagctgagacggaggttgttccggtcacaccagaggatgcgaagggagaggagcaatatcatcttttacggggaattcaacagcttggtgagacatctgttggtatgtggtctaagccaacggttagacgcaagacaaagattgtttgcacaattggtccatccaccaacacacgggaaatgatatggaagctggctgaggctggaatgaatgtcgcccgcctgaatatgtctcatggagatcatgcatctcatcagaaggttattgatttggtaaaagagtataatgcacaatccaaagataatgtcattgcaatcatgcttgataccaagggccctgaggtcaggagtggggacttgccccagccaatcatgttaaaaagtgggcaggaattcaccttcacaattcaaagaggcgttgggacagcagattgtgttagtgttaactatgatgattttgtcaatgatgtagaaatgggcgacatgcttctcgtggatggtggtatgatgtcattaatggtcaagtccaagactggagattcagtgaaatgtgaagttgttgatggtggagaactcaagtctagaaggcatctaaatgttcgaggaaaaagtgcaacactgccatcaattactgaaaaggactgggatgatatcaagtttggtgttgacaataaagtggacttttatgcagtctcctttgttaaagatgcaaaagtagtccatgaattgaagaactatctgaaaagctgtaatgcagatatccatgtcattgttaaaattgaaagtgccgactccattcccaatctacattcaattattaccgcatctgatggggcaatggttgctagaggggatcttggtgccgagcttcctattgaggaggtcccattgctacaggaagagataatcaggatatgtcgtagcatgggaaaagctgttattgtagcaaccaatatgctggaaagcatgattgttcacccaacaccaacccgagcagaggtatcagacattgccattgctgtccgagagggtgctgatgcagttatgctttctggagaaactgctcatggaaagtttcccttgaaagctgtgaaagtcatgcatacagtttccttaagaactgaagcaaccttggtcggtagcccaatgccaccaaatcttggtcaggctttcaagaaccatatgagcgaaatgtttgctttccatgcaaccatgatgtccaatactctcagtacttcaatagttgttttcactagaactggtttcatggctatccttctgagccattatcgaccttctggcaccatatttgcctttacaaatgaggagagagtacaacagagactagccgtgtaccaaggggtatgtcccatatacatgcagttctcagacgatgccgaagaaacctttgcaaatgccttgactttgttgcagaagcaagggatggtgaaggaaggagaagaggtggctcttgttcagagtggcaggcagccgatctggcggttccaatccacacacaatatccaggtcaggaaagtttaa

SEQ ID NO: 36 - protein, 576 aa, Vitis vinifera
MAQVVATRAIQSSILCPSSGSVHERFEKLKPSGFAAKVLAREERRSRRLAWRGGPIAAAKRSVGAETEVVPVTPEDAKGEEQYHLLRGIQQLGETSVGMWSKPTVRRKTKIVCTIGPSTNTREMIWKLAEAGMNVARLNMSHGDHASHQKVIDLVKEYNAQSKDNVIAIMLDTKGPEVRSGDLPQPIMLKSGQEFTFTIQRGVGTADCVSVNYDDFVNDVEMGDMLLVDGGMMSLMVKSKTGDSVKCEVVDGGELKSRRHLNVRGKSATLPSITEKDWDDIKFGVDNKVDFYAVSFVKDAKVVHELKNYLKSCNADIHVIVKIESADSIPNLHSIITASDGAMVARGDLGAELPIEEVPLLQEEIIRICRSMGKAVIVATNMLESMIVHPTPTRAEVSDIAIAVREGADAVMLSGETAHGKFPLKAVKVMHTVSLRTEATLVGSPMPPNLGQAFKNHMSEMFAFHATMMSNTLSTSIVVFTRTGFMAILLSHYRPSGTIFAFTNEERVQQRLAVYQGVCPIYMQFSDDAEETFANALTLLQKQGMVKEGEEVALVQSGRQPIWRFQSTHNIQVRKV

SEQ ID NO: 37 - DNA, 1749 bp, Populus trichocarpa
atggcgcaagtagtggctaccaccagatcgattcacagttctatcctatcatctccttcctctggatccttacaagaccgagttgataagctactcaaaccttccactctctcttcgaaatttctttcaagtcatgacaagaagaaaattatcagcagcgtttcttctcataggaacactcatattgtggcggcggctgttaagagatccgccgaacctgaagtcattcctgtctcacccgaggatgtaccaaagagggaggagcaatttgtgcaattagagcaactaggtgacacgacagcagctgttggaatgtggacgaagcctactgttaggagaaagacgaagattgtatgtactattggaccgtcaactaacacgaaggagatgatatggaagttggctgaagcgggaatgaatgttgctagaatgaatatgtcacatggagaccatgcttctcatcagaaagtcattgatttggttaaagagtataatgcacaagcgaaagataatgtcattgcaatcatgcttgatactaagggtcctgaagttaggagtggtgacttgcctcagcctatcatgctatcacctggacaggaattcacttttacgattcgtaggggtgttggaacatctgattgtgttagtgtgaactatgatgattttgttagtgatgtagaagcaggcgacatgcttcttgttgatggcggtatgatgtcacttctggtgaagtccaaaacagaggattcagtgaaatgtgaagttgttgatggaggagagcttaagtccaggcgtcatctaaatgttcgaggaaaaagcgcgacattgccttccatcactgacaaggattgggatgatataaaattcggagtggagaacaaagttgacttctatgctgtttcctttgttaaagatgcacaagtggttcatgaattgaagaattatctacaaagctgtggtgcagatatacatgtgattgtaaaaattgaaagtgcagattctataccaaatttgcattcgataatcacagcatctgatggggctatggttgcaagaggagatcttggtgcagagctccctattgaggaggttcccctgctgcaggaagagataatcaggctgtgccggagcatgggaaaagctgttattgtagcaacgaatatgctggaaagcatgattgttcatccaactcctaccagagcagaggtatcagacattgccattgctgttcgtgagggtgctgatgcagtcatgctttctggagaaactgcacatggaaaattcccactgaaagctgttaaagttatgcacacagtctccttgcgaactgaagcaaccatagctggtggtgaaatgccttctaatcttggtcaagcattcaagaaccatacgagtgagatgtttgcataccatgcaaccatgatgtcaaacactcttggaacctcaattgttgtcttcacaagaactggcttcatgtctatattactgagccattatcgaccttcaggcactgtttttgcattcacaaatgagaagaggatacaacagagactggctttgtatcaaggagtgtgtcccatatacatgcagttttcagatgatgctgaagaaacctttgcaaatgccttgtcagtgctcaagaatcaagggatggtaaaggaaggagaagaggtcgcacttgttcaaagtggaagacaaccaatctggcggttccaatctacccataatattcaggtccgcaaagtataa

SEQ ID NO: 38 - protein, 582 aa, Populus trichocarpa
MAQVVATTRSIHSSILSSPSSGSLQDRVDKLLKPSTLSSKFLSSHDKKKIISSVSSHRNTHIVAAAVKRSAEPEVIPVSPEDVPKREEQFVQLEQLGDTTAAVGMWTKPTVRRKTKIVCTIGPSTNTKEMIWKLAEAGMNVARMNMSHGDHASHQKVIDLVKEYNAQAKDNVIAIMLDTKGPEVRSGDLPQPIMLSPGQEFTFTIRRGVGTSDCVSVNYDDFVSDVEAGDMLLVDGGMMSLLVKSKTEDSVKCEVVDGGELKSRRHLNVRGKSATLPSITDKDWDDIKFGVENKVDFYAVSFVKDAQVVHELKNYLQSCGADIHVIVKIESADSIPNLHSIITASDGAMVARGDLGAELPIEEVPLLQEEIIRLCRSMGKAVIVATNMLESMIVHPTPTRAEVSDIAIAVREGADAVMLSGETAHGKFPLKAVKVMHTVSLRTEATIAGGEMPSNLGQAFKNHTSEMFAYHATMMSNTLGTSIVVFTRTGFMSILLSHYRPSGTVFAFTNEKRIQQRLALYQGVCPIYMQFSDDAEETFANALSVLKNQGMVKEGEEVALVQSGRQPIWRFQSTHNIQVRKV

SEQ ID NO: 39 - DNA, 1743 bp, Vitis vinifera
  Vitis vinifera Hom 88
atggctcaggtggtggcgactcgcgcgattcagagctcgattctgtgccctagctctggatccgtgcatgagcgatttgagaagctgaagccctccggtttcgctgcgaaagtgttggctcgcgaagagcggaggagccggagagtggcttggaggggcggtccgattgcggcggcgaagagatctgtgggagctgagayggaggttgttccggtcacaccagaggatgcgaagggagaggagcaatatcatcgtttacggggaattcaacagcttggtgagacatctgttggtatgtggtctaagccaacagttagacgcaagacaaagattgtttgcactattggtccatccaccaacacacgggaaatgatatggaagctggctgaagctggaatgaatgtagcccgcctgaatatgtctcatggagatcatgcatctcatcagaaggttattgatttggtaaaagagtataatgcacaatccaaagataatgtcattgcaatcatgcttgataccaaggcaagttttctaggccctgaggtcaggagtggggacttgccccagccaatcatgttaaaaagtgggcaggaattcaccttcacaattcaaagaggcgttgggacagcagattgtgttagtgttaactatgatgattttgtcaatgatgtagaaatgggcgacatgcttcttgtggatggtggtatgatgtcattaatggtcaagtccaagactggagattcagtgaaatgtgaagttgttgatggaggagagctcaagtctagaaggcatctaaatgttcgaggaaaaagtgcaacactgccatcaattactgaaaaggactgggatgatatcaagtttggtgttgacaataaagtggacttttatgcagtctcctttgttaaagatgcgaaagtagtccatgaattgaagaactatctgaaaagctgtaatgcagatatccatgtcattgttaaaattgaaagtgccgactccattcccaatctacattcaattattaccgcatctgatggggcaatggttgctagaggggatcttggtgccgagcttcctattgaggaggtcccattgctacaggaagagataatcaggatatgtcgtagcatgggaaaagctgttattgtagcaaccaatatgctggaaagcatgattgttcacccaacaccaacccgagcagaggtatcagacattgccattgctgtccgagagggtgctgatgcagttatgctttctggagaaactgctcatggaaagtttcccttgaaagctgtgaaagtcatgcatacagtttccttaagaactgaagcaaccttggtyggtagcccaatgccaccaaatcttggtcaggctttcaagaaccatatgagcgaaatgtttgctttccatgcaaccatgatgtccaatactctcggtacttcaatagttgttttcactagaactggtttcatggctatccttctgagccattatcgaccttctggcaccatatttgcctttacaaatgaggagagagtacaacagagactagccgtgtaccaaggggtatgtcccatatacatgcagttctcagacgatgctgaagaaacctttgcaaatgccttgtctttgttgcagaagcaagggatggtgaaggaaggagaagaggtggctcttgttcagagtggcaggcagccgatctggcggttccaatccacacacaatatccaggtcaggaaagtttaa

SEQ ID NO: 40 - protein, 580 aa, Vitis vinifera
  misc_feature (67)..(67): Xaa can be any naturally occurring amino acid
MAQVVATRAIQSSILCPSSGSVHERFEKLKPSGFAAKVLAREERRSRRVAWRGGPIAAAKRSVGAEXEVVPVTPEDAKGEEQYHRLRGIQQLGETSVGMWSKPTVRRKTKIVCTIGPSTNTREMIWKLAEAGMNVARLNMSHGDHASHQKVIDLVKEYNAQSKDNVIAIMLDTKASFLGPEVRSGDLPQPIMLKSGQEFTFTIQRGVGTADCVSVNYDDFVNDVEMGDMLLVDGGMMSLMVKSKTGDSVKCEVVDGGELKSRRHLNVRGKSATLPSITEKDWDDIKFGVDNKVDFYAVSFVKDAKVVHELKNYLKSCNADIHVIVKIESADSIPNLHSIITASDGAMVARGDLGAELPIEEVPLLQEEIIRICRSMGKAVIVATNMLESMIVHPTPTRAEVSDIAIAVREGADAVMLSGETAHGKFPLKAVKVMHTVSLRTEATLVGSPMPPNLGQAFKNHMSEMFAFHATMMSNTLGTSIVVFTRTGFMAILLSHYRPSGTIFAFTNEERVQQRLAVYQGVCPIYMQFSDDAEETFANALSLLQKQGMVKEGEEVALVQSGRQPIWRFQSTHNIQVRKV

SEQ ID NO: 41 - DNA, 1734 bp, Glycine max
atggctcaggtagctgcctcacgatccattcaaagcacccctttgtgccccacttctggatctgcacgtgacagagcccaaaacctgttaaagcctccatcttttgcttccaaggtgtttccttttgtagggaacaacaacaaacgctccaaactcagcctcagaggccttcagatcagtgcaaggaaatcagccccttctgaagtcatccccgtgtcacccgaagatgatccaaagattgaggagcatttgcaacatttacgtggggtgcagccatttggtgagaactctgttggtatgtggtctaagcccacgtttaggcgcaaaacgaagatagtgtgtactattggaccttctaccaatacgagggaaatgatttggaagctggctgaggctggcatgaatgttgctcggttgaatatgtctcatggagaccatgcttctcatcagaaagttattgacttggttaaggaatataatgcttctcatggagacaatgtgattgcaatcatgcttgacacaaagggtcctgaagttaggagtggggatttgccacaaccaattacattaatgcctggtcaggaattcacttttactattcagagaggtgttggaactgctgattgtgttagtgtgaactacgatgattttgtcaatgatgtggaagtgggggacatgcttcttgtcgatggtggtatgatgtcaatggttgttaagtctaagacaaaggattctgtgaaatgtgaagttgttgatggaggagagctcaagtcaaggcgacatttgaacgttagaggaaaaagtgcaactctgccttcaatcactgagaaggattgggatgatatcaagtttggagtggataacaaagttgacttttatgctgtttcctttgttaaggatgctgaagttgttcatgagctgaagaattatttgaagagctgtggtgctgatatacatgtcatcgtaaaaatcgaaagtgcagactctataccaaatttgcattcaattatcactgcgtctgatggggctatggttgccagaggagatcttggcgctgagctccctattgaagaggttccacttttgcaggaagagataatcaatttgtgtcgtagcatgggaaaggctgttattgtggcaacaaatatgctagaaagcatgattgttcacccaactccaaccagagcagaggtatcggatatagcaattgctgttcgagaaggttctgatggaataatgttgtctggagaaacagctcatggaaagttcccactaaaagctgtgaaagtaatgcacacagtagcattacggactgaagctactataccaggtggtcaaatgccacctaatattggtccagtgttgaagaaccacatgagtgagatgtttgcataccatgcaaccatgatgtctaacactcttggaacctcaactgttgtcttcactagaacgggtttcatggctgtccttctgagccattatcgtccttcgggcaccatatttgcttttacagatgagaagagggtacaacagaggctggctttgtatcaaggagtctgtccaatatacatggaattctgtgacgattctgaggcaactttcagaagagccttgaatttgctgcagaagcaaggaatggtgaaggaaggagaagaagtagcacttgtacaaagtggtaggcaacccatatggaggttccaatccacgcacaatatccaggttaggaaagtgtaa

SEQ ID NO: 42 - protein, 577 aa, Glycine max
MAQVAASRSIQSTPLCPTSGSARDRAQNLLKPPSFASKVFPFVGNNNKRSKLSLRGLQISARKSAPSEVIPVSPEDDPKIEEHLQHLRGVQPFGENSVGMWSKPTFRRKTKIVCTIGPSTNTREMIWKLAEAGMNVARLNMSHGDHASHQKVIDLVKEYNASHGDNVIAIMLDTKGPEVRSGDLPQPITLMPGQEFTFTIQRGVGTADCVSVNYDDFVNDVEVGDMLLVDGGMMSMVVKSKTKDSVKCEVVDGGELKSRRHLNVRGKSATLPSITEKDWDDIKFGVDNKVDFYAVSFVKDAEVVHELKNYLKSCGADIHVIVKIESADSIPNLHSIITASDGAMVARGDLGAELPIEEVPLLQEEIINLCRSMGKAVIVATNMLESMIVHPTPTRAEVSDIAIAVREGSDGIMLSGETAHGKFPLKAVKVMHTVALRTEATIPGGQMPPNIGPVLKNHMSEMFAYHATMMSNTLGTSTVVFTRTGFMAVLLSHYRPSGTIFAFTDEKRVQQRLALYQGVCPIYMEFCDDSEATFRRALNLLQKQGMVKEGEEVALVQSGRQPIWRFQSTHNIQVRKV

SEQ ID NO: 43 - DNA, 1728 bp, Glycine max
atgtctcaggtagtggccactcgatccattcactcctccctcacgcgccccacctcaggatctgcacaccacagggcccaaacgttgttgaagcctccaacttttgcttccaaattgttcggagcacaaaggaacaacccctccaaagtttgctcccgaagttgcctcgtcaatgcgaggaaatctgcacccgctaaagttgttcccgtgtcacccgaggatgattcaaagattgaggaagagttgcagcacttgcgtggtatgcagcaacttggcgacacttctgttggaatgtggtcaaaacccacgtttaggaggaagacaaaggttgtttgcaccattggtccttctaccaacaccagggaaatgatttggaagctggctgaggctgggatgaatgttgcccgattgaatatgtctcacggagaccatgcttctcatcagaaaattattgatttggttaaagaatataatgctcaatccaaggacaacgtaattgcaattatgcttgataccaagggtcctgaggttaggagtggggatttgccacaaccaatcaatttaacaactgggcaggaattcacttttaccatccggaggggtgttggaactgcagattgtgttagtgtgaactatgacgatttcgtcaatgatgtggatgtgggagacatgcttcttgttgatggtggtatgatgtctttggtggttaagtctaagacagaggattctgtgaaatgtgaagttgttgatggaggagagctcaagtcaaggagacatttgaatgttagaggaaaaagtgcaacactgccttccataactgagaaggattgggatgacatcaaatttggagtggataacaaagttgacttctatgctgtttcttttgttaaggatgcacaagtagttcatgaactgaagaattatttgaaaagctgtgatgctgatatacacgtcattgtaaaaattgaaagtgcagactctataccaaacttgcattcaattattacagcgtctgatggggccatggttgcaagaggagatcttggtgcagaactccctattgaagaggttccacttttgcaggaagaaataatcaccatatgtcgtagcatgggaaaggccgttattgtggcaacaaatatgctggaaagcatgattgttcacccgacaccaaccagagccgaggtatccgatattgcaattgctgttcgagaaggttctgatgcaataatgctttctggggaaactgctcatggaaagttcccactaaaagccgtgaaagtaatgcacaccgtagcattacggacagaagccactatacctggtggtcaaatgccaccaaatattggtcaagtattcaagaaccacatgagtgagatgtttgcttaccatgcaaccatgatgtctaatacccttggaacctcaactgttgtcttcactagatcaggcttcatggctatccttttgagccactatcgaccttcaggcaccatatttgcttttacagatcaaaagaggatacaacagaggttggctttgtatcaaggagtctgtcctatttacatggaattctctgaagatgctgaagagactttcacaagggccttggatttgctgcagaagcaaggaatggtgaaatcaggagaagaagtagcactagtacaaagtggcacgcaacccatatggaggttccaatccactcacaatatccaggtccgaacagtgtaa

SEQ ID NO: 44 - protein, 575 aa, Glycine max
MSQVVATRSIHSSLTRPTSGSAHHRAQTLLKPPTFASKLFGAQRNNPSKVCSRSCLVNARKSAPAKVVPVSPEDDSKIEEELQHLRGMQQLGDTSVGMWSKPTFRRKTKVVCTIGPSTNTREMIWKLAEAGMNVARLNMSHGDHASHQKIIDLVKEYNAQSKDNVIAIMLDTKGPEVRSGDLPQPINLTTGQEFTFTIRRGVGTADCVSVNYDDFVNDVDVGDMLLVDGGMMSLVVKSKTEDSVKCEVVDGGELKSRRHLNVRGKSATLPSITEKDWDDIKFGVDNKVDFYAVSFVKDAQVVHELKNYLKSCDADIHVIVKIESADSIPNLHSIITASDGAMVARGDLGAELPIEEVPLLQEEIITICRSMGKAVIVATNMLESMIVHPTPTRAEVSDIAIAVREGSDAIMLSGETAHGKFPLKAVKVMHTVALRTEATIPGGQMPPNIGQVFKNHMSEMFAYHATMMSNTLGTSTVVFTRSGFMAILLSHYRPSGTIFAFTDQKRIQQRLALYQGVCPIYMEFSEDAEETFTRALDLLQKQGMVKSGEEVALVQSGTQPIWRFQSTHNIQVRTV

SEQ ID NO: 45 - DNA, 1728 bp, Glycine max
atgtctcaggtagtggccactcgatccattcactcctccctcacgcgccccacctcaggatctgcacaccacagggcccaaacgttgttgaagcctccaacttttgcttccaaattgttcggagcacaaaggaacaacccctccaaagtttgctcccgaagttgcctcgtcaatgcgaggaaatctgcacccgctaaagttgttcccgtgtcacccgaggatgattcaaagattgaggaagagttgcagcacttgcgtggtatgcagcaacttggcgacacttctgttggaatgtggtcaaaacccacgtttaggaggaagacaaaggttgtttgcaccattggtccttctaccaacaccagggaaatgatttggaagctggctgagactgggatgaatgttgcccgattgaatatgtctcacggagaccatgcttctcatcagaaaattattgatttggttaaagaatataatgctcaatccaaggacaacgtaattgcaattatgcttgataccaagggtcctgaggttaggagtggggatttgccacaaccaatcaatttaacaactgggcaggaattcacttttaccatccggaggggtgttggaactgcagattgtgttagtgtgaactatgacgatttcgtcaatgatgtggatgtgggagacatgcttcttgttgatggtggtatgatgtctttggtggttaagtctaagacagaggattctgtgaaatgtgaagttgttgatggaggagagctcaagtcaaggagacatttgaatgttagaggaaaaagtgcaacactgccttccataactgagaaggattgggatgacatcaaatttggagtggataacaaagttgacttctatgctgtttcttttgttaaggatgcacaagtagttcatgaactgaagaattatttgaaaagctgtgatgctgatatacacgtcattgtaaaaattgaaagtgcagactctataccaaacttgcattcaattattacagcgtctgatggggccatggttgcaagaggagatcttggtgcagaactccctattgaagaggttccacttttgcaggaagaaataatcaccatatgtcgtagcatgggaaaggccgttattgtggcaacaaatatgctggaaagcatgattgttcacccgacaccaaccagagccgaggtatccgatattgcaattgctgttcgagaaggttctgatgcaataatgctttctggggaaactgctcatggaaagttcccactaaaagccgtgaaagtaatgcacaccgtagcattacggacagaagccactatacctggtggtcaaatgccaccaaatattggtcaagtattcaagaaccacatgagtgagatgtttgcttaccatgcaaccatgatgtctaatacccttggaacctcaactgttgtcttcactagatcaggcttcatggctatccttttgagccactatcgaccttcaggcaccatatttgcttttacagatcaaaagaggatacaacagaggttggctttgtatcaaggagtctgtcctatttacatggaattctctgaagatgctgaagagactttcacaagggccttggatttgctgcagaagcaaggaatggtgaaatcaggagaagaagtagcactagtacaaagtggcacgcaacccatatggaggttccaatccactcacaatatccaggtccgaacagtgtaa

SEQ ID NO: 46 - protein, 575 aa, Glycine max
MSQVVATRSIHSSLTRPTSGSAHHRAQTLLKPPTFASKLFGAQRNNPSKVCSRSCLVNARKSAPAKVVPVSPEDDSKIEEELQHLRGMQQLGDTSVGMWSKPTFRRKTKVVCTIGPSTNTREMIWKLAETGMNVARLNMSHGDHASHQKIIDLVKEYNAQSKDNVIAIMLDTKGPEVRSGDLPQPINLTTGQEFTFTIRRGVGTADCVSVNYDDFVNDVDVGDMLLVDGGMMSLVVKSKTEDSVKCEVVDGGELKSRRHLNVRGKSATLPSITEKDWDDIKFGVDNKVDFYAVSFVKDAQVVHELKNYLKSCDADIHVIVKIESADSIPNLHSIITASDGAMVARGDLGAELPIEEVPLLQEEIITICRSMGKAVIVATNMLESMIVHPTPTRAEVSDIAIAVREGSDAIMLSGETAHGKFPLKAVKVMHTVALRTEATIPGGQMPPNIGQVFKNHMSEMFAYHATMMSNTLGTSTVVFTRSGFMAILLSHYRPSGTIFAFTDQKRIQQRLALYQGVCPIYMEFSEDAEETFTRALDLLQKQGMVKSGEEVALVQSGTQPIWRFQSTHNIQVRTV

SEQ ID NO: 47 - DNA, 1734 bp, Glycine max
atggctcaggtcgtggcttcacgatccattcaaagcaccccattgtgccccacttctggatctgcacgtgacagaacccaaaacctgttaaagcctccatcttttgcttccaaggtgttcccattgggagagaacaataacaaacgctccaaactcaggctcagaagccttcagatcagtgcaaggaaatctgccccttctgaagtcatccccatgtcacccgaagatgatccaaaaattgaggagcatttgcaacatttacgtggggtgcagccatttggtgagaactctgttggaatgtggtctaagccaacgtttaggcgcaagacgaagatagtgtgcaccattggaccttctaccaatacgagggaaatgatttggaagctggctgaggctggcatgaatgttgctcggttgaatatgtctcatggggaccatgcttctcatcagaaagttattgacttggttaaggagtataatgcttctcatgaagacaatgtgattgcaatcatgcttgacacaaagggtcctgaagttaggagtggggatttgccacaaccaattacattaatgcctgggcaggaattcacttttactattcagagaggtgttggaactgctgattgtgttagtgtgaactacgatgattttgtgaatgatgtggaaatgggggacatgcttcttgtcgatggtggtatgatgtctatggttgttaagtctaagacagaggattctgtgaaatgtgaagttgttgatggaggagagctcaagtcaaggcgacatttgaacgttagaggaaaaagtgcaacactaccttcaatcactgagaaggattgggatgatatcaagtttggagtggataacaaagttgacttctatgctgtttcctttgttaaggatgctgaagttgttcatgaactgaagaattatttgaagagctgcggtgctgatatacatgtcatcgtaaaaattgaaagtgcagactctataccaaatttgcattcaattatcactgcatctgatggggcaatggttgccagaggagatcttggcgctgagctccctattgaagaggttccacttttgcaggaagagataatcaacttgtgtcgtagcatgggaaaggctgttattgtggcaacaaatatgctagaaagcatgattgttcacccaactccaaccagagcagaggtatcagatatagcaattgcagttcgtgaaggttctgatggaataatgttgtctggagaaacagctcatggaaagttcccactaaaagctgtgcaagtaatgcacacagtagcattgcggacagaagccactataccaggtggtaaaatgccacctaacattggtcaagtgttgaagaaccacatgagtgagatgtttgcataccatgcaaccatgatgtctaacacccttggaacctcaactgttgtcttcactagaacgggtttcatggctgtccttctgagtcactatcgtccttctgggaccatatttgcttttacagatgagaagagggtacaacagaggctggctttgtatcaaggagtctgtcccatatacatggaattctgtgatgattctgaggcaacttttagaagagccttggatttgctgcagaagcaagcaatggtgaaggaaggagaagaagtagcacttgtacaaagtggtaggcaacccatatggaggttccaatccacgcacaatatccaggttaggaaagtgtaa

SEQ ID NO: 48 - protein, 577 aa, Glycine max
MAQVVASRSIQSTPLCPTSGSARDRTQNLLKPPSFASKVFPLGENNNKRSKLRLRSLQISARKSAPSEVIPMSPEDDPKIEEHLQHLRGVQPFGENSVGMWSKPTFRRKTKIVCTIGPSTNTREMIWKLAEAGMNVARLNMSHGDHASHQKVIDLVKEYNASHEDNVIAIMLDTKGPEVRSGDLPQPITLMPGQEFTFTIQRGVGTADCVSVNYDDFVNDVEMGDMLLVDGGMMSMVVKSKTEDSVKCEVVDGGELKSRRHLNVRGKSATLPSITEKDWDDIKFGVDNKVDFYAVSFVKDAEVVHELKNYLKSCGADIHVIVKIESADSIPNLHSIITASDGAMVARGDLGAELPIEEVPLLQEEIINLCRSMGKAVIVATNMLESMIVHPTPTRAEVSDIAIAVREGSDGIMLSGETAHGKFPLKAVQVMHTVALRTEATIPGGKMPPNIGQVLKNHMSEMFAYHATMMSNTLGTSTVVFTRTGFMAVLLSHYRPSGTIFAFTDEKRVQQRLALYQGVCPIYMEFCDDSEATFRRALDLLQKQAMVKEGEEVALVQSGRQPIWRFQSTHNIQVRKV

SEQ ID NO: 49 - DNA, 1728 bp, Glycine max
atgtctcatgtagtggtcactcgatccattcacacctccctcacgcgccccacctcaggatctgcacaccacagagcccaaacgttgttgaagcctccaacttttgcttccaaagtgttcccacaacaaaggaacaacccctccaaagtttgctcccgaagttgcctcgtcaatgcgaggaaatctgcacccactgaagttgttcccgtctcacccgaggatgattcaaagattgaggaagagttgcagcactcgcgtggtatgcggcaacttggtgacacttctgttggaatgtggtcaaaacccacttttaggaggaagacaaaggttgtttgcaccattggtccttctaccaacaccagggaaatgatttggaagctggctgaggctgggatgaatgttgcccgattgaatatgtctcatggagaccatgcttctcatcagaaaattattgatttggttaaagaatataatgctcaatccaaggacaatgtaattgcaattatgcttgataccaagggtcctgaggttaggagtggggatttgccacaaccaatcaatttaacaactgggcaggaattcacatttaccatccggaggggtgttggaactgcagattgtgttagtgtgaactatgacgatttcgtcaatgatgtggatgtgggagacatgcttcttgttgatggtggtatgatgtctttggtggttaagtctaagacagaggattctgtgaaatgtgaagttgttgatggaggagagctcaagtcaaggagacatttgaacgttagaggaaaaagtgcaacactgccttcaatcactgagaaggattgggatgacatcaaatttggagtggataacaaagttgacttctatgctgtttcttttgttaaggatgcacaagtagttcatgaactgaagaattatttgaaaagctgtgatgctgatatacacgtcattgtaaaaattgaaagtgcagactctataccaaacttgcattcaattattacagcgtctgatggggccatggttgcaagaggagatcttggtgcagaactccctattgaagaggttccacttttgcaggaagaaataatcaccatatgtcgtagcatgggaaaggccgttattgtggcaacaaatatgctggaaagcatgattgttcacccgacaccaaccagagccgaggtatccgatattgcaattgctgttcgagaaggttctgatgcaataatgctttctggggaaactgctcatggaaagttcccactaaaagccgtgaaagtaatgcacaccgtagcattacggacagaagccactatacctggtggtcaaatgccaccaaatattggtcaagtattcaagaaccacatgagtgagatgtttgcttaccatgcaaccatgatgtctaatacccttggaacctcaactgttgtcttcactagatcaggcttcatggctatccttttgagccactatcgaccttcaggcaccatatttgcttttacagatcaaaagaggatacaacagaggttggctttgtatcaaggagtctgtcctatttacatggaattctctgaagatgctgaagagactttcacaagggccttggatttgctgcagaagcaaggaatggtgaaatcaggagaagaagtagcactagtacaaagtggcacgcaacccatatggaggttccaatccactcacaatatccaggtccgaacagtgtaa

SEQ ID NO: 50 - protein, 575 aa, Glycine max
MSHVVVTRSIHTSLTRPTSGSAHHRAQTLLKPPTFASKVFPQQRNNPSKVCSRSCLVNARKSAPTEVVPVSPEDDSKIEEELQHSRGMRQLGDTSVGMWSKPTFRRKTKVVCTIGPSTNTREMIWKLAEAGMNVARLNMSHGDHASHQKIIDLVKEYNAQSKDNVIAIMLDTKGPEVRSGDLPQPINLTTGQEFTFTIRRGVGTADCVSVNYDDFVNDVDVGDMLLVDGGMMSLVVKSKTEDSVKCEVVDGGELKSRRHLNVRGKSATLPSITEKDWDDIKFGVDNKVDFYAVSFVKDAQVVHELKNYLKSCDADIHVIVKIESADSIPNLHSIITASDGAMVARGDLGAELPIEEVPLLQEEIITICRSMGKAVIVATNMLESMIVHPTPTRAEVSDIAIAVREGSDAIMLSGETAHGKFPLKAVKVMHTVALRTEATIPGGQMPPNIGQVFKNHMSEMFAYHATMMSNTLGTSTVVFTRSGFMAILLSHYRPSGTIFAFTDQKRIQQRLALYQGVCPIYMEFSEDAEETFTRALDLLQKQGMVKSGEEVALVQSGTQPIWRFQSTHNIQVRTV

SEQ ID NO: 51 - DNA, 1728 bp, Glycine max
atgtctcatgtagtggtcactcgatccattcacacctccctcacgcgccccacctcaggatctgcacaccacagagcccaaacgttgttgaagcctccaacttttgcttccaaagtgttcccacaacaaaggaacaacccctccaaagtttgctcccgaagttgcctcgtcaatgcgaggaaatctgcacccgctaaagttgttcccgtctcacccgaggatgattcaaagattgaggaagagttgcagcactcgcgtggtatgcagcaacttggcgacacttctgttggaatgtggtcaaaacccacgtttaggaggaagacaaaggttgtttgcaccattggtccttctaccaacaccagggaaatgatttggaagctggctgaggctgggatgaatgttgcccgattgaatatgtctcacggagaccatgcttctcatcagaaaattattgatttggttaaagaatataatgctcaatccaaggacaacgtaattgcaattatgcttgataccaagggtcctgaggttaggagtggggatttgccacaaccaatcaatttaacaactgggcaggaattcacatttaccatccggaggggtgttggaactgcagattgtgttagtgtgaactatgacgatttcgtcaatgatgtggatgtgggagacatgcttcttgttgatggtggtatgatgtctttggtggttaagtctaagacagaggattctgtgaaatgtgaagttgttgatggaggagagctcaagtcaaggagacatttgaatgttagaggaaaaagtgcaacactgccttccataactgagaaggattgggatgacatcaaatttggagtggataacaaagttgacttctatgctgtttcttttgttaaggatgcacaagtagttcatgaactgaagaattatttgaaaagctgtgatgctgatatacacgtcattgtaaaaattgaaagtgcagactctataccaaacttgcattcaattattacagcgtctgatggggccatggttgcaagaggagatcttggtgcagaactccctattgaagaggttccacttttgcaggaagaaataatcaccatatgtcgtagcatgggaaaggccgttattgtggcaacaaatatgctggaaagcatgattgttcacccgacaccaaccagagccgaggtatccgatattgcaattgctgttcgagaaggttctgatgcaataatgctttctggggaaactgctcatggaaagttcccactaaaagccgtgaaagtaatgcacaccgtagcattacggacagaagccactatacctggtggtcaaatgccaccaaatattggtcaagtattcaagaaccacatgagtgagatgtttgcttaccatgcaaccatgatgtctaatacccttggaacctcaactgttgtcttcactagatcaggcttcatggctatccttttgagccactatcgaccttcaggcaccatatttgcttttacagatcaaaagaggatacaacagaggttggctttgtatcaaggagtctgtcctatttacatggaattctctgaagatgctgaagagactttcacaagggccttggatttgctgcagaagcaaggaatggtgaaatcaggagaagaagtagcactagtacaaagtggcacgcaacccatatggaggttccaatccactcacaatatccaggtccgaacagtgtaa

SEQ ID NO: 52 - protein, 575 aa, Glycine max
MSHVVVTRSIHTSLTRPTSGSAHHRAQTLLKPPTFASKVFPQQRNNPSKVCSRSCLVNARKSAPAKVVPVSPEDDSKIEEELQHSRGMQQLGDTSVGMWSKPTFRRKTKVVCTIGPSTNTREMIWKLAEAGMNVARLNMSHGDHASHQKIIDLVKEYNAQSKDNVIAIMLDTKGPEVRSGDLPQPINLTTGQEFTFTIRRGVGTADCVSVNYDDFVNDVDVGDMLLVDGGMMSLVVKSKTEDSVKCEVVDGGELKSRRHLNVRGKSATLPSITEKDWDDIKFGVDNKVDFYAVSFVKDAQVVHELKNYLKSCDADIHVIVKIESADSIPNLHSIITASDGAMVARGDLGAELPIEEVPLLQEEIITICRSMGKAVIVATNMLESMIVHPTPTRAEVSDIAIAVREGSDAIMLSGETAHGKFPLKAVKVMHTVALRTEATIPGGQMPPNIGQVFKNHMSEMFAYHATMMSNTLGTSTVVFTRSGFMAILLSHYRPSGTIFAFTDQKRIQQRLALYQGVCPIYMEFSEDAEETFTRALDLLQKQGMVKSGEEVALVQSGTQPIWRFQSTHNIQVRTV

SEQ ID NO: 53 - DNA, 1737 bp, Glycine max
atgtctcatgtagtggtcactcgatccattcacacctccctcacgcgccccacctcaggatctgcacaccacagagcccaaacgttgttgaagcctccaacttttgcttccaaagtgttcccacaacaaaggaacaacccctccaaagtttgctcccgaagttgcctcgtcaatgcgaggaaatctgcacccactgaagttgttcccgtctcacccgaggatgattcaaagattgaggaagagttgcagcactcgcgtggtatgcggcaacttggtgacacttctgttggaatgtggtcaaaacccacttttaggaggaagacaaaggttgtttgcaccattggtccttctaccaacaccagggaaatgatttggaagctggctgaggctgggatgaatgttgcccgattgaatatgtctcatggagaccatgcttctcatcagaaaattattgatttggttaaagaatataatgctcaatccaaggacaatgtaattgcaattatgcttgataccaagggtcctgaggttaggagtggggatttgccacaaccaatcaatttaacaactgggcaggaattcacatttaccatccggaggggtgttggaactgcagattgtgttagtgtgaactatgacgatttcgtcaatgatgtggatgtgggggacatgcttcttgttgatggtggtatgatgtctttggtggttaagtctaagacagaggattctgtgaaatgtgaagttgttgatggaggagagctcaagtcaaggagacatttgaatgttagaggaaaaagtgcaacacttccttccatcactgagaaggattgggatgacatcaaatttggagtggataacaaagttgacttctatgctgtttcttttgttaaagatgcacaagtagttcatgaactgaagaattatttgaaaagctgtgatgctgatatacatgtcattgtaaaaattgaaagtgcagactctataccaaacttgcattcaattattacagcgtctgatggggccatggttgcaagaggagatcttggtgcagagctccctattgaagaggttccacttttgcaggaagagataataagcatatgccgtagcatgggaaaggctgttattgtggcaacaaatatgctggaaagcatgattgttcacccaacaccaaccagagccgaggtatccgatattgcaattgctgttcgagaaggttctgatgcaataatgctttctggggaaactgctcacggaaagttcccgctaaaagccgtgaaagtaatgcataccgtagcattacggacagaagccaccatacccggtggtcagatgccaccaaatattggtcaagtattcaagaaccacatgagtgagatgtttgcttaccatgcaaccatgatgtctaataccctcggaacctcaactgttgtcttcactagatcaggcttcatggctatccttttgagccactatcgaccttcaggcaccatatttgcttttacagatcaaaagaggatacaacagaggttggctttgtatcaaggagtctgtcctatttacatggaattctctgaagatgctgaagagactttcacaagggccttggatttgctgcagaagcaaggaatggtgaaatcaggagaagaagtagcactagtacaaagtggcaggcaacccatatggaggttccaatccactcacaatatccaggtccgaacagtgaaaacaaaataa

SEQ ID NO: 54 - protein, 578 aa, Glycine max
MSHVVVTRSIHTSLTRPTSGSAHHRAQTLLKPPTFASKVFPQQRNNPSKVCSRSCLVNARKSAPTEVVPVSPEDDSKIEEELQHSRGMRQLGDTSVGMWSKPTFRRKTKVVCTIGPSTNTREMIWKLAEAGMNVARLNMSHGDHASHQKIIDLVKEYNAQSKDNVIAIMLDTKGPEVRSGDLPQPINLTTGQEFTFTIRRGVGTADCVSVNYDDFVNDVDVGDMLLVDGGMMSLVVKSKTEDSVKCEVVDGGELKSRRHLNVRGKSATLPSITEKDWDDIKFGVDNKVDFYAVSFVKDAQVVHELKNYLKSCDADIHVIVKIESADSIPNLHSIITASDGAMVARGDLGAELPIEEVPLLQEEIISICRSMGKAVIVATNMLESMIVHPTPTRAEVSDIAIAVREGSDAIMLSGETAHGKFPLKAVKVMHTVALRTEATIPGGQMPPNIGQVFKNHMSEMFAYHATMMSNTLGTSTVVFTRSGFMAILLSHYRPSGTIFAFTDQKRIQQRLALYQGVCPIYMEFSEDAEETFTRALDLLQKQGMVKSGEEVALVQSGRQPIWRFQSTHNIQVRTVKTK

SEQ ID NO: 55 - DNA, 1704 bp, Arabidopsis thaliana
atggctgcttatggtcaaatctcctcgggaatgactgtagatcctcaggttctctcttcctccagaaacattggagtttccctatcacctctccggagaacactaatcggcgccggagttaggtctactagtatctctctccgtcaatgttctctctccgttagatcgattaaaatctccgaagatagccgcaaacctaaagcttatgcagagaacggtgcttttgatgtgggagttttggattcttcatcatatagattggctgattcaagaacaagtagtaatgattcaaggaggaagactaagattgtgtgtacgattggaccgtcttcgagttctagggaaatgatttggaaactcgcggaagctggaatgaatgtggctcgtttgaatatgtctcatggtgatcatgcttctcatcagataactattgatttagttaaggagtataattctttgtttgttgacaaagctattgctattatgttggatacaaagggtcctgaggttcgaagcggggatgtaccgcagccgatatttcttgaagagggtcaagagtttaactttactatcaagagaggtgtttcgcttaaagacactgttagtgtaaattatgatgattttgtgaacgatgttgaagttggggatatacttttggtggatggtggaatgatgtcgttagctgttaaatcaaagacgagtgatttggtgaagtgtgtggttattgatggtggagagcttcaatctagacgtcacttgaatgttcgaggaaagagtgcgactcttccatccattacagacaaagattgggaagacataaaatttggagtggacaaccaagtcgatttctacgccgtctcctttgttaaggatgctaaagttgtccatgagttgaagaactatctcaaaaacatatcggtgattgtgaaaattgaaagtgcagactctataaagaatcttccttctatcatatctgcttgtgatggggcaatggttgctcgtggagatcttggagctgaacttcccattgaagaggtcccgttgttacaggaagaaataatcagaaggtgtagaagcattcataaaccagtgattgttgccacaaacatgctagagagtatgattaatcatccaacgcctacaagagctgaagtctctgacattgcaattgcagtacgtgaaggcgcagatgctatcatgctttctggtgaaaccgcacatggaaagtttccgctgaaagctgttaacgtaatgcatactgtggcgttgagaaccgaggcaagtctacctgtcagaacctcggcatcccgtaccactgcttacaagggtcacatgggccaaatgtttgcttttcatgcttctataatggcaaatacactgagctcaccgctaattgtatttacgagaaccggatccatggcagtgcttctaagccactaccgcccatctgcaacaattttcgccttcacaaaccagagaagaataatgcaaaggcttgctctttatcaaggtgtcatgcctatatatatggagttctcggatgatgcagaagatacatatgcccggtctctcaaactcttacaggacgagaatatgctcaaggaaggacaacatgtaactcttgtccaaagtggctcgcaacccatttggcgtgaagaatcaacacatctcatacaagtccgtaagataaagataggtggatga

SEQ ID NO: 56 - protein, 567 aa, Arabidopsis thaliana
MAAYGQISSGMTVDPQVLSSSRNIGVSLSPLRRTLIGAGVRSTSISLRQCSLSVRSIKISEDSRKPKAYAENGAFDVGVLDSSSYRLADSRTSSNDSRRKTKIVCTIGPSSSSREMIWKLAEAGMNVARLNMSHGDHASHQITIDLVKEYNSLFVDKAIAIMLDTKGPEVRSGDVPQPIFLEEGQEFNFTIKRGVSLKDTVSVNYDDFVNDVEVGDILLVDGGMMSLAVKSKTSDLVKCVVIDGGELQSRRHLNVRGKSATLPSITDKDWEDIKFGVDNQVDFYAVSFVKDAKVVHELKNYLKNISVIVKIESADSIKNLPSIISACDGAMVARGDLGAELPIEEVPLLQEEIIRRCRSIHKPVIVATNMLESMINHPTPTRAEVSDIAIAVREGADAIMLSGETAHGKFPLKAVNVMHTVALRTEASLPVRTSASRTTAYKGHMGQMFAFHASIMANTLSSPLIVFTRTGSMAVLLSHYRPSATIFAFTNQRRIMQRLALYQGVMPIYMEFSDDAEDTYARSLKLLQDENMLKEGQHVTLVQSGSQPIWREESTHLIQVRKIKIGG

SEQ ID NO: 57 - DNA, 1713 bp, Arabidopsis lyrata
atggcggctttaggtcaaatctcctcgggaatgactgtagatcctcaggttctctcctcctccagaaacattggagtttcactatcaccactccggcgaacactaatcggcgccggaggtaggtctactatctccctccgtcaatgttctctctccgttagatcgattaaaatcaccgaagataaccgcaaagttaaagcttatgctgataacggcgctttcgatatggattcttcagttgattcatcgtatagattggcggattcaagaacaagtaataatgattcgaggaggaagacgaagattgtgtgtacgattggaccgtcatcgagttctcgggagatgatttggaagctcgcggaagcgggaatgaatgtggctcgtttgaatatgtctcatggtgatcatgcttctcatcagaagactattgatttagttaaggaatataattctttgtttgttgacaaagctattgctattatgttggatacaaagggtcctgaggttcgaagcggggatgtacctcagccgatatttcttgaagagggtcaagagtttaattttactatcaagagaggtgtttcgcttaaagacactgttagtgtaaattatgatgattttgttaatgatgttgaagttggggacatacttttggtggatggcggaatgatgtcattagctgttaaatcaaagacgagtgatttggtgaagtgtgtggttattgatggtggagagcttcaatctagacgtcacttgaatgttcgtggaaagagtgcgactcttccttccataacagacaaagattgggaggacataaaatttggagtggacaaccaggtcgatttctatgccgtctcctttgttaaggatgctaaagttgtccatgagttgaagaactatctcaaaacctgcagtgcggatatatcggtaatcgtgaagattgaaagcgctgactctataaagaatcttccttctatcatatctgcttgtgatggggcaatggttgctcgtggagatcttggagctgaacttcccattgaagaggtcccattgttacaggaagagataatcagaaggtgtagaagcatccataaaccagtgattgtcgccacaaacatgctagagagtatgattaatcatccaacgcctacaagagctgaagtctctgacattgctattgcagtacgtgaaggtgcagatgctatcatgctttctggtgaaaccgcacacggaaagtttccgctcaaagctgttaacgtaatgcatactgtggcgttgagaactgaggcaagtctacctgtcagaacctctgcaacccgtaccactgcttacaagggtcacatgggccaaatgtttgcttttcatgcttctataatggcaaatacactgagctcaccgctaattgtattcacgagaaccggatccatggcagtgcttctaagccattaccgcccatccgcaacaattttcgcctttacaaaccagagaaggataatgcaaaggttggctctttatcaaggtgtcatgcctatatatatggagttctcggatgatgcagaagatacatatgcccggtctctgaaactcttacaggacgagcatatgctgaaggaaggacaacatgtaactcttgtccaaagcggctcgcaacccatttggcgtgaagaatcaacacatctcatacaagtccgtaagacaaatataggtggatga

SEQ ID NO: 58 - protein, 570 aa, Arabidopsis lyrata
MAALGQISSGMTVDPQVLSSSRNIGVSLSPLRRTLIGAGGRSTISLRQCSLSVRSIKITEDNRKVKAYADNGAFDMDSSVDSSYRLADSRTSNNDSRRKTKIVCTIGPSSSSREMIWKLAEAGMNVARLNMSHGDHASHQKTIDLVKEYNSLFVDKAIAIMLDTKGPEVRSGDVPQPIFLEEGQEFNFTIKRGVSLKDTVSVNYDDFVNDVEVGDILLVDGGMMSLAVKSKTSDLVKCVVIDGGELQSRRHLNVRGKSATLPSITDKDWEDIKFGVDNQVDFYAVSFVKDAKVVHELKNYLKTCSADISVIVKIESADSIKNLPSIISACDGAMVARGDLGAELPIEEVPLLQEEIIRRCRSIHKPVIVATNMLESMINHPTPTRAEVSDIAIAVREGADAIMLSGETAHGKFPLKAVNVMHTVALRTEASLPVRTSATRTTAYKGHMGQMFAFHASIMANTLSSPLIVFTRTGSMAVLLSHYRPSATIFAFTNQRRIMQRLALYQGVMPIYMEFSDDAEDTYARSLKLLQDEHMLKEGQHVTLVQSGSQPIWREESTHLIQVRKTNIGG

SEQ ID NO: 59 - DNA, 1716 bp, Brassica napus
atggcggcgacaggtcaaatctcgacgagaatgacggtggatcgcactctgtcctcctccaggaacgctggactttccctttcaccatcaccccagagaacgctaatcggcgtcgccggtaggtctggtatcgctcaccgtcaactgtctctctccgtcagagcgattaacaccaatgaagatagccggaaagtcaaggtttatgcagagaacggcgctttcgatttgggagtgatggatccttcagtggagccatataaatttgcggagccaagaacaagtcataatgattcgaggaggaaaaccaagattgtgtgtaccattggaccttcctctagctctcgtgaaatgatttggaaactcgcggaagcaggaatgaatgtggctcgtttgaatatgtctcatggagatcatgcttctcatcagattactattgatcttgttaaagaatacaactctctctttgttgacaaagccattgctatcatgttggatacaaagggtcctgaggttcgaagtggggatgtacctcagccgatcttccttgaagagggtcaagagtttaattttaccatcaagagaggtgtctcaatgaaagacaccgtcagtgtcaactatgatgattttgttaacgatgtcgaagttggagacatacttttggtcgatggtggaatgatgtcactagctgttaagtccaagacgagcgatttggtgaaatgtgtagttattgacggtggagagcttcaatctagacgtcacttgaatgttcgaggaaagagtgctactcttccttccataacagacaaagattgggaagacatcaaatttggagtggacaaccaagttgatttctatgctgtctcttttgttaaggatgctaaagttgtccatgagttgaaaaactacctcaaaagctgcagtgcggatatctctgtgattgtgaaaattgaaagcgcagattctataaagaatcttccttccattatatctgcttgtgatggggcaatggttgctcgtggagatcttggagctgaacttcccattgaggaggttcccttgttacaggaggagataatcacaaggtgtaggaacattcataaaccagtgattgtcgccacaaacatgctagagagtatgattaatcatccaacacctacaagagctgaagtatctgacattgcaattgcagtgcgcgaaggagcagatgcaatcatgctttctggtgaaaccgcacacggaaagtttcctctgaaagctgttaacgtgatgcataccgtggctttgagaactgaggctagtctacctgttagaacctcagcaatccggaccactgcttacaagggtcgcatgggccaaatgtttgctttccatgcttctataatggcgaatacactgaacacaccgatcattgtgttcacaagaactggatccatggcagtgcttctgagtcactaccgcccgtcctcaacaattttcgccttcacaaaccagaggagaataatgcaaaggctggctctttaccaaggtgtcatgcctatatacatggagttttctgatgatgcagaagatacatatgcccgttccttgaaactcctacaggacgagaatatgcttaaggaaggacaacatgtaactcttgtccaaagtggtgcgcaacccatttggcgtgaagaatcaacacatctcatacaagtccgtaagattaagataggttga

SEQ ID NO: 60 - protein, 571 aa, Brassica napus
MAATGQISTRMTVDRTLSSSRNAGLSLSPSPQRTLIGVAGRSGIAHRQLSLSVRAINTNEDSRKVKVYAENGAFDLGVMDPSVEPYKFAEPRTSHNDSRRKTKIVCTIGPSSSSREMIWKLAEAGMNVARLNMSHGDHASHQITIDLVKEYNSLFVDKAIAIMLDTKGPEVRSGDVPQPIFLEEGQEFNFTIKRGVSMKDTVSVNYDDFVNDVEVGDILLVDGGMMSLAVKSKTSDLVKCVVIDGGELQSRRHLNVRGKSATLPSITDKDWEDIKFGVDNQVDFYAVSFVKDAKVVHELKNYLKSCSADISVIVKIESADSIKNLPSIISACDGAMVARGDLGAELPIEEVPLLQEEIITRCRNIHKPVIVATNMLESMINHPTPTRAEVSDIAIAVREGADAIMLSGETAHGKFPLKAVNVMHTVALRTEASLPVRTSAIRTTAYKGRMGQMFAFHASIMANTLNTPIIVFTRTGSMAVLLSHYRPSSTIFAFTNQRRIMQRLALYQGVMPIYMEFSDDAEDTYARSLKLLQDENMLKEGQHVTLVQSGAQPIWREESTHLIQVRKIKIG

SEQ ID NO: 61 - DNA, 1647 bp, Zea mays
atggccaccgctgcccgctccctccacctccctggtccgacgcctcctaaatcctctaccccctcctcccaccgcctccctgtcccttgccacctccgcccccaacgccgccgcctggccgcctcgtcctccgacctcacctccttccccgaaccgccccccgccaccgaggcggagctgcgggagaacgggttccggagcacgcgccgcaccaagctcgtctgcaccgtgggccccgccacctgcggcgccgccgagctcgaggcgctcgccgtcggcggcatgaacgtcgcgcgggtcaacatgtgccacggcgaccgcgagtggcaccgcgaagtcatccgcgctgtccggaggctcaacgacgagaaagggttcgcggtcgccgtgatgatggacaccgagggcagcgagatccacatgggcgaccttggcggagcgccctccgcgaaggccgaggatggagaagtttggacatttagcgttagatcttctgacacgtcgctcccagatcgaatcattcatgtgaactatgatggctttgctgaagatgtcaaagctggtgatgaactatttgcggacggtggaatggccaggtttgaggtgattgaaaagttagggccagatgtgaagtgccgctgcactgatcctggtctgttgctgccacgggctaatcttactatatggcgcgatggcagtgtagtgcgagagaggaacgctatgcttcctacaatttcgtcgaaggattggattgacatagattttggaattgctgaaggtgttgatttcatcgccgtgtcatttgtcaagtctgctgaagtaattaatcatttgaagagttacattgctgcgaggagccgtggaagtgatataggggtcattgcaaagattgagagcatcgatgctttgaagaacctggaggagattatccgtgcatcagatggagtaatggtagccagaggggacttgggggcacaaatccccctggaacaggtcccttccatacagcaaagaatagttagaatgtgcagacagctcaacaagccagtcattgttgcttctcagcttctggaatcaatgatcgagtatcctacacctactagggctgaggttgctgatgtttctgaggcagtccgccagcgtgcagatgctctcatgctttctggtgagtcggccatggggaggtacccagagaaggctctcagcgtccttaggagtgttagcctgaggatcgaaaggtggtggagagaggagaagcgccaagaggcactggagcttcaaggtgtctcgtcttccttttctgacaagatatcagaggaaatatgcaattcagcagctaaaatggccaacaacttaggagtcgacgccgttttcgtttacacgaaggatggctacatgggctccctgctctcacgatgccgccccgactgcccgatcttcgccttcacgtcttcgacgtctgtcaggagacggctgaacctccagtggggcctcatcccgttccggctgagcgagtccgacgacatggagagcaacctcaaccgcaccttctccctgctgaaggccaggggcatggtgcagtctggagacctggtgatcgcgctctccgacatgctgcagtccatccaagtggtgaatgtgccctag

SEQ ID NO: 62 - protein, 548 aa, Zea mays
MATAARSLHLPGPTPPKSSTPSSHRLPVPCHLRPQRRRLAASSSDLTSFPEPPPATEAELRENGFRSTRRTKLVCTVGPATCGAAELEALAVGGMNVARVNMCHGDREWHREVIRAVRRLNDEKGFAVAVMMDTEGSEIHMGDLGGAPSAKAEDGEVWTFSVRSSDTSLPDRIIHVNYDGFAEDVKAGDELFADGGMARFEVIEKLGPDVKCRCTDPGLLLPRANLTIWRDGSVVRERNAMLPTISSKDWIDIDFGIAEGVDFIAVSFVKSAEVINHLKSYIAARSRGSDIGVIAKIESIDALKNLEEIIRASDGVMVARGDLGAQIPLEQVPSIQQRIVRMCRQLNKPVIVASQLLESMIEYPTPTRAEVADVSEAVRQRADALMLSGESAMGRYPEKALSVLRSVSLRIERWWREEKRQEALELQGVSSSFSDKISEEICNSAAKMANNLGVDAVFVYTKDGYMGSLLSRCRPDCPIFAFTSSTSVRRRLNLQWGLIPFRLSESDDMESNLNRTFSLLKARGMVQSGDLVIALSDMLQSIQVVNVP

SEQ ID NO: 63 - DNA, 1722 bp, Helianthus annuus
atggcacaatctctcaatttcttcgtatcaacctctccatccccagacttttattcccactccaaactcgcccttcaaaccccccatcatcatcatcgactcctcttccccttcaccaacaaacccccccttcgtttatgcgcatctgccgacaacggtgtatccgccgtgacaaccgattacgtcacccaaaacaacggggtatcagtatctgcgggttcgatcgaggtggatgcggtgacggaggcagagctgaaggagaacgggttcaggagcacgcggaggacgaagctggtgtgcacgatcggaccggcgacatgtgggttcgagcagctggaggcgttggctgttggggggatgaatgtggctcggattaatatgtgtcatgggacacgtgagtggcacaagagcgtgattgataaagtgaggaggttgaatgaggagaaagggtatgctgttgctatcatgatggatactgaaggtagtgagattcatatgggggatcttggtggtgcttcttctgctaaagctgaggatggacaagtatggactttcagtgttcgggcttatgatactcttcgtcctgagcgctgcatcactgtgaactatgatggttttgcagaagatgttaaagttggggatgaactccttgttgatggtggaatggtgaggtttgaggtgatagaaaagattggtccagatgtcaagtgcttgtgtactgaccccggacttttgctacctcgggctaacttgactttctggcgagatggtagcttagttcgtgaacgtaatgccatgcttccaacaatttcttcaaaggattggttggatattgattttgggattgcagaaggtgttgatttcattgcagtatcatttgtcaagtcagcagaagtgattaatcatcttaaaagttacatcaaagcacggtctcgtgatggggatatagcggtaatttcaaagatcgagagcatcgactcattgaaaaacttggaggagataattctagcttctgacggagccatggtagccagaggggatctgggtgcacaaatcccactggaacaggttccgttggctcaacagaagatcgttgaagtgtgcagacagttgaacaaaccagtaatagttgcttctcaactactagaatctatgatcgagtacccgacacctaccagagctgaagtggctgatgtttctgaagcagtgagacaacgagctgatgctcttatgctgtctggtgagtcggccatgggtcagttccctgacaaggctttgaccgtcttgagaagtgttagtttaagaattgagaaatggtggagggaagagaaacgtcatgaagttatggatcttcctgatatcgcttcttctttctctgatagtatttctgaggaaatctgcaattctgctgccaaaatggctaataacttggaggtagatgcactttttgtctacacgaaagacggacacatggcatctctcttgtcgcgtagccgcccggattgccccattttcgctttcacaaccgatacattggttagaagacgtctaaatctacaatggggtctaattccgttccgccttgacttctcagacgacatggaaaccaatctcaacaagactttctctctcctcaaggctcgaggtatgatcaaatctggcgatcttgttattgctgtatctgatatgttgcagtcgattcaagttatgaatgtgccataa

SEQ ID NO: 64 - protein, 573 aa, Helianthus annuus
MAQSLNFFVSTSPSPDFYSHSKLALQTPHHHHRLLFPFTNKPPLRLCASADNGVSAVTTDYVTQNNGVSVSAGSIEVDAVTEAELKENGFRSTRRTKLVCTIGPATCGFEQLEALAVGGMNVARINMCHGTREWHKSVIDKVRRLNEEKGYAVAIMMDTEGSEIHMGDLGGASSAKAEDGQVWTFSVRAYDTLRPERCITVNYDGFAEDVKVGDELLVDGGMVRFEVIEKIGPDVKCLCTDPGLLLPRANLTFWRDGSLVRERNAMLPTISSKDWLDIDFGIAEGVDFIAVSFVKSAEVINHLKSYIKARSRDGDIAVISKIESIDSLKNLEEIILASDGAMVARGDLGAQIPLEQVPLAQQKIVEVCRQLNKPVIVASQLLESMIEYPTPTRAEVADVSEAVRQRADALMLSGESAMGQFPDKALTVLRSVSLRIEKWWREEKRHEVMDLPDIASSFSDSISEEICNSAAKMANNLEVDALFVYTKDGHMASLLSRSRPDCPIFAFTTDTLVRRRLNLQWGLIPFRLDFSDDMETNLNKTFSLLKARGMIKSGDLVIAVSDMLQSIQVMNVP

SEQ ID NO: 65 - DNA, 1722 bp, Artificial sequence
  Codon optimized HaPK001 for expression in Zea mays
atggcccagagcctgaacttcttcgtgagcaccagcccgagcccggacttctacagccacagcaagctggccctgcagaccccgcaccaccaccacaggctgctgttcccgttcaccaacaagccgccgctgaggctgtgcgccagcgccgacaacggcgtgagcgccgtgaccaccgactacgtgacccagaacaacggcgtgagcgtgagcgccggcagcatcgaggtggacgccgtgaccgaggccgagctgaaggagaacggcttcaggagcaccaggaggaccaagctggtgtgcacgatcggcccggccacctgcggcttcgagcagctggaggccctggccgtgggcgggatgaacgtggccaggatcaatatgtgccacggcaccagggagtggcacaagagcgtgatcgacaaggtgaggaggctgaacgaggagaagggctacgccgtggccatcatgatggacaccgagggcagcgagatccacatgggcgacctgggcggcgccagcagcgccaaggccgaggacggccaggtgtggaccttcagcgtgagggcctacgacaccctgaggccggagaggtgcatcaccgtgaactacgacggcttcgccgaggacgtgaaggtgggcgacgagctgctggtggacggcggcatggtgaggttcgaggtgatcgagaagatcggcccggacgtgaagtgcctgtgcaccgacccgggcctgctgctgccgagggccaacctgaccttctggagggacggcagcctggtgagggagaggaacgcgatgctgccgacgatcagcagcaaggactggctggatatcgacttcgggatcgccgagggcgtggactttatcgccgtgagcttcgtgaagagcgccgaggtgatcaaccacctgaagagctatatcaaggccaggagcagggacggcgacatcgccgtgatcagcaagatcgagagcatcgacagcctgaagaacctggaggagatcatcctggccagcgacggcgcgatggtggccaggggcgacctgggcgcccagatcccgctggagcaggtgccgctggcccagcagaagatcgtggaggtgtgcaggcagctgaacaagccggtgatcgtggccagccagctgctggagagtatgatcgagtacccgaccccgaccagggccgaggtggccgacgtgagcgaggccgtgaggcagagggccgacgccctgatgctgagcggcgagagcgcgatgggccagttcccggacaaggccctgaccgtgctgaggagcgtgagcctgaggatcgagaagtggtggagggaggagaagaggcacgaggtgatggacctgccggatatcgccagcagcttcagcgacagtatcagcgaggagatctgcaacagcgccgccaagatggccaacaacctggaggtggacgccctgttcgtgtacaccaaggacggccatatggccagcctgctgagcaggagcaggccggactgcccgatcttcgccttcaccaccgacaccctggtgaggaggaggctgaacctgcagtggggcctgatcccgttcaggctggacttcagcgacgatatggagaccaacctgaacaagaccttcagcctgctgaaggccaggggtatgatcaagagcggcgacctggtgatcgccgtgagcgatatgctgcagagtatccaggtgatgaacgtgccgtga

SEQ ID NO: 66 - protein, 573 aa, Helianthus annuus; identical to SEQ ID NO: 64

SEQ ID NO: 67 - DNA, 1743 bp, Helianthus annuus
atggcggcgcaagtggttgcttcgaagctgacacacagttcctttgcatgccctaattcttccaaaaaccagattcagaagatcaaacaacctagtggttttggttctaaagctgtgattggtaacaatgaacaagatcaaaccagactgacttacaaacatcgttgtgttgttgttagcgtcacttcaaggagacaacaagagctccaagttgttgttccggttacacctgaagacgtacctaagattgcagagccagattatgatacaccggaagttttgcagcagggggacagatcggtaagcatgtggtcaaggcccttagtgaagcgcaaaacaaaaatcgtttgcacaatcggtccatccacaaacaccaaggaaatgatatggaaactggctgaggcggggatgaacgtagcaaggttaaacatgtcccacggagaccacgcgtcccatcagaaagttatcgaccttgttaaggaatacaacgctcaatctaaagataacgttattgcaattatgctcgacacaaaggggcccgaagtcaggagtggagacttgcctcagccggttaatttagtaagtggccaagaattcacgttcacgatcaaacggggcgttggcacatcggagtgtgtaagcgttaactatgatgattttgtgaatgacgtggaagctggtgacatgcttctggttgatggtggtatgatgtcattgttggtgaaatccaagaccgaagattcagtaacatgtgaagttgtcgatggcggagagctcaaatcgagacgccacttaaatgttagaggaaaaagtgcaactttgccatccatcactgaaaaagattgggatgatatcaaatttggagtggacaatgaagttgatttctacgcggtctcctttgttaaagatgcggaagtcattcatgagttaaagaattacctcaaaagctgcggtgcaaatatccaagtaattccaaaaattgaaagtgcagactcgataccgaacttacattcaattatcacagcatcagacggtgcaatggttgcaagaggagatcttggtgcagagctgcctattgaagaggttccactgttgcaggaagagatcataagaacatgcaggagcatggggaaagcggtgatagttgcaacgaacatgcttgaaagcatgatagtccatccaacaccaacgagagcggaggtatctgacatcgctattgctgtcagagagggtgctgatgcggttatgctttctggagaaacagctcatggaaagtttcctttaaaagctgttaaagttatgcacacagtgtcgttgcgaactgaagcaagcattacgggtggtgtcacaccctctaatcttggtcaagcctttaagaaccatatgagtgaaatgttcgcgtttcatgccacatcaatgtcaaacactcttggaacctcactcgtggtttttactagaaccggtttcatggctattctattgagtcattatcgacccactggcaccatctttgccttcacaaaccagaaacgagtgcaacagaagttagctttgtatcaaggagtttgccccatctatatggagttctctaatgatgctgatgagaccttcgaaaacgctctcagcaccttgaagaaacaagggatggtaaaagaaggtgatgaggtagcgcttgttcaaagcgggaggcagccgatctggcggttccaatccacacataatattcaggtcaggaaggtgtaa

SEQ ID NO: 68 - protein, 580 aa, Helianthus annuus
MAAQVVASKLTHSSFACPNSSKNQIQKIKQPSGFGSKAVIGNNEQDQTRLTYKHRCVVVSVTSRRQQELQVVVPVTPEDVPKIAEPDYDTPEVLQQGDRSVSMWSRPLVKRKTKIVCTIGPSTNTKEMIWKLAEAGMNVARLNMSHGDHASHQKVIDLVKEYNAQSKDNVIAIMLDTKGPEVRSGDLPQPVNLVSGQEFTFTIKRGVGTSECVSVNYDDFVNDVEAGDMLLVDGGMMSLLVKSKTEDSVTCEVVDGGELKSRRHLNVRGKSATLPSITEKDWDDIKFGVDNEVDFYAVSFVKDAEVIHELKNYLKSCGANIQVIPKIESADSIPNLHSIITASDGAMVARGDLGAELPIEEVPLLQEEIIRTCRSMGKAVIVATNMLESMIVHPTPTRAEVSDIAIAVREGADAVMLSGETAHGKFPLKAVKVMHTVSLRTEASITGGVTPSNLGQAFKNHMSEMFAFHATSMSNTLGTSLVVFTRTGFMAILLSHYRPTGTIFAFTNQKRVQQKLALYQGVCPIYMEFSNDADETFENALSTLKKQGMVKEGDEVALVQSGRQPIWRFQSTHNIQVRKV

SEQ ID NO: 69 - DNA, 1743 bp, Artificial sequence
  codon optimized sequence of HaPK002 for expression in Zea mays
atggccgcccaggtggtggccagcaagctgacccacagcagcttcgcctgcccgaacagcagcaagaaccagatccagaagatcaagcagccgagcggcttcggcagcaaggccgtgatcggcaacaacgagcaggaccagaccaggctgacctacaagcacaggtgcgtggtggtgagcgtgaccagcaggaggcagcaggagctgcaggtggtggtgccggtgaccccggaggacgtgccgaagatcgccgagccggactacgacaccccggaggtgctgcagcagggcgacaggagcgtgagcatgtggagcaggccgctggtgaagaggaagaccaagatcgtgtgcacgatcggcccgagcaccaacaccaaggagatgatctggaagctggccgaggccgggatgaacgtggccaggctgaatatgagccacggcgaccacgccagccaccagaaggtgatcgacctggtgaaggagtacaacgcccagagcaaggacaacgtgatcgcgataatgctggacaccaagggcccggaggtgaggagcggcgacctgccgcagccggtgaacctggtgagcggccaggagttcaccttcacgatcaagaggggcgtgggcaccagcgagtgcgtgagcgtgaactacgacgacttcgtgaacgacgtggaggccggcgacatgctgctggtggacggcggcatgatgagcctgctggtgaagagcaagaccgaggacagcgtgacctgcgaggtggtggacggcggcgagctgaagagcaggaggcacctgaacgtgaggggcaagagcgccaccctgccgagtatcaccgagaaggactgggacgatatcaagttcggcgtggacaacgaggtggacttctacgccgtgagcttcgtgaaggacgccgaggtgatccacgagctgaagaactacctgaagagctgcggcgccaacatccaggtgatcccgaagatcgagagcgccgacagcatcccgaacctgcacagcattatcaccgccagcgacggcgcgatggtggccaggggcgacctgggcgccgagctgccgatcgaggaggtgccgctgctgcaggaggagataatcaggacctgcaggagtatgggcaaggccgtgatcgtggccaccaatatgctggagagtatgatcgtgcacccgaccccgaccagggccgaggtgagcgatatcgcgatcgccgtgagggagggcgccgacgccgtgatgctgagcggcgagaccgcccacggcaagttcccgctgaaggccgtgaaggtgatgcacaccgtgagcctgaggaccgaggccagtatcaccggcggcgtgaccccgagcaacctgggccaggccttcaagaaccatatgagcgagatgttcgccttccacgccaccagtatgagcaacaccctgggcaccagcctggtggtgttcaccaggaccggctttatggcgatcctgctgagccactacaggccgaccggcaccatcttcgccttcaccaaccagaagagggtgcagcagaagctggccctgtaccagggcgtgtgcccgatctacatggagttcagcaacgacgccgacgagaccttcgagaacgccctgagcaccctgaagaagcagggcatggtgaaggagggcgacgaggtggccctggtgcagagcggcaggcagccgatctggaggttccagagcacccacaatatccaggtgaggaaggtgtga

SEQ ID NO: 70 - protein, 580 aa, Helianthus annuus; identical to SEQ ID NO: 68

SEQ ID NO: 71 - DNA, 1518 bp, Helianthus annuus
atgaagactgatcagagtgcgcaacagatcggcgtgaagaggccgaaaacgaagatcgtttgcactcttggaccggcttccagatctgttctcatggtggagaagttgctgaaagcgggaatgaacgttgccaggttcaacttctcgcatgggtcttacgagtatcatcaggagacacttgataatctgaggaccgctatggatagtactggtattctttgtgcggttatgcttgatacaaagggtccagagattagaaccggttttctaaaagatggcaagcccatccagctaaaacaaggccaagaaatcaccatctcaaccgattacgacataaaaggcgacgaaaccatgatctgcatgagctacaaaaagttagcctacgacgtaaagccagggagcgtcatactatgcgcagatggcactatttcatttactgttcttgcttgtgacaccgaaaatggtttggtccgttgtcgctgtgagaacactgcggttcttggtgagcgaaagaatgttaatcttcctggagtgatcgtcgacttaccaactttgactgagaaagacaaagaggatatactcacatggggagttccgaacaagattgatatgattgcgctgtcgtttgttcgcaaaggctcggatttggtcgaggttcgaaagctgttgggtaagcatgctaatagcattcttcttatgtcaaaggttgagaatcaagaaggggtagcaaacttcgacgaaatcctagccaactccgacgcgttcatggtggcgcgtggtgatctcggaatggagattccgatcgagaagatattcttagcccaaaaggtcatgatctacaaatgcaacatacaaggaaagccggtggtaaccgccactcaaatgctcgagtcaatgatcaaatctccaagaccaactcgagccgaagctacagatgtggccaacgcagttctagatggtacagactgtgtcatgcttagcggtgaaacagccgctggagcctacccagagctagcggtcctaaccatggctaggatttgtgttgaagccgagaacacaatcgattacccggatgttttcaaaagaattgcggcaaacgcacccatacccatgagcccactcgagagcttagcctctgctgcggtccgaaccgccaactcatctagagcaagcctcattctggttctgaccagaggcggaagcacagccaagctggtggctaagtacagaccgggcatgcctgtattatctgtagtggttcccgaaatccaaaccgattctttcgattggtcatgcagtgacgaaacgccagctaggcatagtcttattttcagaggtttggtcccggttctatctgcagggtccactagagcttcctatgctgagtcaaccgaagaggttttggactttgcattgcaacatgcgaaactcaagggactctgcaaggaaggcgatgctgttgtggctttacatcgtgtgggaatcgcttctgttattaagataattaacgtcaagtaa

SEQ ID NO: 72 - protein, 505 aa, Helianthus annuus
MKTDQSAQQIGVKRPKTKIVCTLGPASRSVLMVEKLLKAGMNVARFNFSHGSYEYHQETLDNLRTAMDSTGILCAVMLDTKGPEIRTGFLKDGKPIQLKQGQEITISTDYDIKGDETMICMSYKKLAYDVKPGSVILCADGTISFTVLACDTENGLVRCRCENTAVLGERKNVNLPGVIVDLPTLTEKDKEDILTWGVPNKIDMIALSFVRKGSDLVEVRKLLGKHANSILLMSKVENQEGVANFDEILANSDAFMVARGDLGMEIPIEKIFLAQKVMIYKCNIQGKPVVTATQMLESMIKSPRPTRAEATDVANAVLDGTDCVMLSGETAAGAYPELAVLTMARICVEAENTIDYPDVFKRIAANAPIPMSPLESLASAAVRTANSSRASLILVLTRGGSTAKLVAKYRPGMPVLSVVVPEIQTDSFDWSCSDETPARHSLIFRGLVPVLSAGSTRASYAESTEEVLDFALQHAKLKGLCKEGDAVVALHRVGIASVIKIINVK

SEQ ID NO: 73 - DNA, 1518 bp, Artificial sequence
  codon optimized sequence of HaPK003 for expression in Zea mays
atgaagaccgaccagagcgcccagcagatcggcgtgaagaggccgaagaccaagatcgtgtgcaccctgggcccggccagcaggagcgtgctgatggtggagaagctgctgaaggccggcatgaacgtggccaggttcaacttcagccacggcagctacgagtaccaccaggagaccctggacaacctgaggaccgccatggacagcaccggcatcctgtgcgccgtgatgctggacaccaagggcccggagatcaggaccggcttcctgaaggacggcaagccgatccagctgaagcagggccaggagatcacgatcagcaccgactacgacatcaagggcgacgagaccatgatctgcatgagctacaagaagctggcctacgacgtgaagccgggcagcgtgatcctgtgcgccgacggcaccatcagcttcaccgtgctggcctgcgacaccgagaacggcctggtgaggtgcaggtgcgagaacaccgccgtgctgggcgagaggaagaacgtgaacctgccgggcgtgatcgtggacctgccgaccctgaccgagaaggacaaggaggatatcctgacctggggcgtgccgaacaagatcgatatgatcgccctgagcttcgtgaggaagggcagcgacctggtggaggtgaggaagctgctgggcaagcacgccaacagtatcctgctgatgagcaaggtggagaaccaggagggcgtggccaacttcgacgagatcctggccaacagcgacgcctttatggtggccaggggcgacctgggaatggagatcccgatcgagaagatcttcctggcccagaaggtgatgatctacaagtgcaacatccagggcaagccggtggtgaccgccacccagatgctggagagcatgatcaagagcccgaggccgaccagggccgaggccaccgacgtggccaacgccgtgctggacggcaccgactgcgtgatgctgagcggcgagaccgccgccggcgcctacccggagctggccgtgctgaccatggccaggatctgcgtggaggccgagaacaccatcgactacccggacgtgttcaagaggatcgccgccaacgccccgatcccgatgagcccgctggagagcctggccagcgccgccgtgaggaccgccaacagcagcagggccagcctgatcctggtgctgaccaggggcggcagcaccgccaagctggtggccaagtacaggccgggaatgccggtgctgagcgtggtggtgccggagatccagaccgacagcttcgactggagctgcagcgacgagaccccggccaggcacagcctgatcttcaggggcctggtgccggtgctgagcgccggcagcaccagggccagctacgccgagagcaccgaggaggtgctggacttcgccctgcagcacgccaagctgaagggcctgtgcaaggagggcgacgccgtggtggccctgcacagggtggggatcgccagcgtgatcaagataatcaacgtgaagtga

SEQ ID NO: 74 - protein, 505 aa, Helianthus annuus; identical to SEQ ID NO: 72

SEQ ID NO: 75 - DNA, 1443 bp, Pectobacterium wasabiae
atgagcaggcgtctaaggcgtaccaagatcgtcacaaccttaggacctgcgaccgatcgggacaataacctggagaaaatcatcaatgccggcgccaatgtggtaagaatgaactttagccatggcactgctgaagaccaccagctccgtgccaacaaagttcgagagatagcagcgaagctcggaaggcacgtcgcgattctaggcgatcttcaaggacccaaaattcgagtgagcacgttcaaggagggcaagatcttcctgaatatcggtgacaagttccttctggacgccaacctcgctaagggagagggagataaggaaaaggtcggtattgactacaagggactcccgagcgacgtggtccctggtgatatcttgcttctcgacgacgggagggttcagttgaaagttttgcaagttgagggactcaaggtttataccgaggtgaccgtgggtggaccactttcgaacaataaggggatcaacaagcttggtggaggcctctctgctgaagcgctgacggagaaggacaaagccgatattatcacggccgcgaagattggggtggattacctggctgtgagcttcccaagaacgggagaggatctcaactacgcgagacggctggctagagacgcgggttgcaacgctaagatagtctccaaggtagagagagctgaggctgtgtgctcagacgctgcaatggacgatataatcctggcctcggatgtcgtgatggtggctcgtggtgatctaggcgtcgaaatcggcgatcccgagctggtagggatacagaagaaactgattcgtagagcgcgacagctaaaccgtgcggtgataactgccactcagatgatggagtccatgattacaaacccgatgcccacacgtgctgaggtgatggacgttgcaaatgccgtccttgatggtactgatgctgtgatgctatctgccgaaactgctgcgggacagtatccagcagagaccgttgcggctatggccaaagtctgtttgggagccgagaagatcccgagtatcaacgtctctaagcaccggttggacgttcagttcgacaacaccgaagaatctatcgcaatgtcctcaatgtacgctgccaaccatcttaagggagttaccgctctgattgctatgacggaatcgggaagaaccgctttgatgatgtcccgaatctccagtgggctccctatcttcgcaatgagtcggcacgagcacacactgaacttgacggctctctaccgtggcgtcacaccggtccacttcgatagctataccgatggagtcgcggccgctaacgatgccgtcatacgcttacgggataagggcttcctgatgtcgggagacttggtgatcgtgacacaaggcgatattatgggaacggtgggcactacgaatactatccgtatcctgagggtggagtag

SEQ ID NO: 76 - protein, 480 aa, Pectobacterium wasabiae
MSRRLRRTKIVTTLGPATDRDNNLEKIINAGANVVRMNFSHGTAEDHQLRANKVREIAAKLGRHVAILGDLQGPKIRVSTFKEGKIFLNIGDKFLLDANLAKGEGDKEKVGIDYKGLPSDVVPGDILLLDDGRVQLKVLQVEGLKVYTEVTVGGPLSNNKGINKLGGGLSAEALTEKDKADIITAAKIGVDYLAVSFPRTGEDLNYARRLARDAGCNAKIVSKVERAEAVCSDAAMDDIILASDVVMVARGDLGVEIGDPELVGIQKKLIRRARQLNRAVITATQMMESMITNPMPTRAEVMDVANAVLDGTDAVMLSAETAAGQYPAETVAAMAKVCLGAEKIPSINVSKHRLDVQFDNTEESIAMSSMYAANHLKGVTALIAMTESGRTALMMSRISSGLPIFAMSRHEHTLNLTALYRGVTPVHFDSYTDGVAAANDAVIRLRDKGFLMSGDLVIVTQGDIMGTVGTTNTIRILRVE

SEQ ID NO: 77 - DNA, 1428 bp, Zymomonas mobilis
atgactgaaggacttttcccacgcggccgcaaggtacgtgttgtttctacgctgggtcctgccagctcgacggcagaacagattcgtgatcgtttcttggctggtgcggatgtattccgtatcaacatgagccatggtacccatgacgaaaagaaggtcatcgttgacaacattcgtgcgcttgaaaaagaattcaaccgcccgaccacgatccttttcgatcttcagggtccgaagctccgcgttggtgacttcaaagaaggcaaggttcagttgaaagaaggccagaccttcactttcgatcaggacccaactctcggtgacgaaacccgcgtcaacctgccgcatcctgaaatcttcaaggctttagacaaaggtcatcgcctgcttttggatgatggtaagatcgttgttcgttgcgtcgaatcttccccgaccaaaatcgttacccgcgtcgaagttccgggtccgctttccgaccataaaggtttcaacgttcctgacgttgtgattccgctggccgctctgaccccgaaagatcgcaaagatctcgactttgctcttaaggaaaaagctgactgggttgctcttagctttgtgcagcgcgtcgaagacgtcatcgaagccaaagaactcatcaaaggtcgcgcaccgcttctcgttaaactcgaaaagccagctgccattgaaaacctcgaatccatcttggctgcaaccgatgctgtcatggttgctcgtggtgacctcggtgttgaatgcttgccggaatccgttcccccgacgcagaagcgtatcgttgaacgctcccgccagctgggtaagccggttgttgttgcaaccgctatgctcgaatccatgatcaaagctccggctccgacccgcgctgaagtaagtgacgttgcaaacgccatttacgaaggtgctgatggtatcatgctttctgcagaatccgccgccggtgattggccgcatgaagctgtcaacatgatgcatcgtattgcttcttatgttgaaaatgctccgggttacatcgaacgcgttcgcttcaccccgactccggcagaaccgacgacggttgacgctctggctgaaaacgccagcaaaaccgctgaaacggttggcgcaaaagcgatcatcgtcttcaccgaaaccggtaagaccgcacagcgcgtttcccgcgcccgtccggttgctccgatcctgtctctgaccccggatgccgaagttgctcgtcgtcttggtttggtctggggcgcacagccggttcaggtttccacggttaagaccctcgacgaagccaagaagctggctgctgaaaccgctaaaaaatacggtttcgccaaagccggtgacaagctggttgttgttgcaggtgaacctttcggtaaagctggaaccaccaacattgttgatgttatcgaagcctaa

SEQ ID NO: 78 - protein, 475 aa, Zymomonas mobilis
MTEGLFPRGRKVRVVSTLGPASSTAEQIRDRFLAGADVFRINMSHGTHDEKKVIVDNIRALEKEFNRPTTILFDLQGPKLRVGDFKEGKVQLKEGQTFTFDQDPTLGDETRVNLPHPEIFKALDKGHRLLLDDGKIVVRCVESSPTKIVTRVEVPGPLSDHKGFNVPDVVIPLAALTPKDRKDLDFALKEKADWVALSFVQRVEDVIEAKELIKGRAPLLVKLEKPAAIENLESILAATDAVMVARGDLGVECLPESVPPTQKRIVERSRQLGKPVVVATAMLESMIKAPAPTRAEVSDVANAIYEGADGIMLSAESAAGDWPHEAVNMMHRIASYVENAPGYIERVRFTPTPAEPTTVDALAENASKTAETVGAKAIIVFTETGKTAQRVSRARPVAPILSLTPDAEVARRLGLVWGAQPVQVSTVKTLDEAKKLAAETAKKYGFAKAGDKLVVVAGEPFGKAGTTNIVDVIEA

SEQ ID NO: 79 - DNA, 1446 bp, Photobacterium profundum
atgtccgagcagcttcggcgcacgaagatcgttactaccctgggacctgccaccgatcgcgacaacaatcttgagaagattatcgcggctggcgcgaacgtggtaagaatgaacttctcgcacggctcacctgaggaccatattcagcgtaccaagatggtcagagagatcgctgcgaagctcggcaagcacattgccatcctgggagatctgcaaggtcccaagatcagggtgagcacattcaaggacggcaagatccagttggcgatcggcgacaagttcacactggattccgacctccccaagggagagggacaccaggatgcggtcggactcgattacaaggagcttccgaacgacgtggtaacgggtgacctgttgcttctcgacgatgggagggttcagctcaaggttactgctgtttctggcaacaaggttcacacggaggtgaccgtgggtggcccactgtctaacaataagggcatcaataagaagggtggaggcctaagcgcggaagcgctcaccgagaaggacaaggccgatataatcaccgccgcgaagatgggtgtggattacctggctgtctcgttcccacgtaatggggaggatatgaaatacgctcgatcgctggctcttgacgcgggactcgaggctaagctggtcgccaaagtcgagcgtgctgaggctgttgctaccacggaggcaatggacgatataattatggcctccgacgtggttatggttgcacgtggggacttaggagtcgaaatcggcgatcccgaactggtcggcgtccagaagaagctgatccgtagagcaagatcgcttaaccgcacggtgatcacggccacccagatgatggagtcgatgattacctcccctatgccgacacgagcggaggtgatggacgttgcaaacgccgtactggacggtactgacgctgtaatgctgtctgccgaaaccgctgccggagacttcccagtagagaccgtccaagctatgagctcagtttgcgtcggggccgagaaggagccttcgatcaacgtgtcaaaccaccgcttggctagaacgttcgctagccccgaagagactatcgcaatgagtacgatgtacgcggccaaccatatggaaggcgtcaaggcgatggtggcaatgacagagtcgggtagaacgcctctaatgatgagtcggatatccagcgggctaccggtcttcgcgatgtctcggaacgagaacacacttaaccgctctagtctctaccgtggcgtcactccggtctacttcgatcgggatagtgatgccggcctcgaagccgcgaagcacgccttggctgttctgaaggagcacggttatctcaccaccggcgacctcgtgattataacgcaaggcgatgtcatggacacgataggtagcaccaataacatgcgaatcctgactgtggagtag

SEQ ID NO: 80 - protein, 481 aa, Photobacterium profundum
MSEQLRRTKIVTTLGPATDRDNNLEKIIAAGANVVRMNFSHGSPEDHIQRTKMVREIAAKLGKHIAILGDLQGPKIRVSTFKDGKIQLAIGDKFTLDSDLPKGEGHQDAVGLDYKELPNDVVTGDLLLLDDGRVQLKVTAVSGNKVHTEVTVGGPLSNNKGINKKGGGLSAEALTEKDKADIITAAKMGVDYLAVSFPRNGEDMKYARSLALDAGLEAKLVAKVERAEAVATTEAMDDIIMASDVVMVARGDLGVEIGDPELVGVQKKLIRRARSLNRTVITATQMMESMITSPMPTRAEVMDVANAVLDGTDAVMLSAETAAGDFPVETVQAMSSVCVGAEKEPSINVSNHRLARTFASPEETIAMSTMYAANHMEGVKAMVAMTESGRTPLMMSRISSGLPVFAMSRNENTLNRSSLYRGVTPVYFDRDSDAGLEAAKHALAVLKEHGYLTTGDLVIITQGDVMDTIGSTNNMRILTVE

SEQ ID NO: 81 - DNA, 1425 bp, Arabidopsis thaliana
atgtccgtggctcgattcgatttctcttggtgcgatgctgattatcaccaggagacgctggagaatctgaagatagctgtgaagagcactaagaagctttgtgctgttatgctagacactgtaggacctgagttgcaagttattaacaagactgagaaagctatttctcttaaagctgatggccttgtaactttgactccgagtcaagatcaagaagcctcctctgaagtccttcccattaattttgatgggttagcgaaggcggttaagaaaggagacactatctttgttggacaatacctcttcactggtagtgaaacaacttcagtttggcttgaggttgaagaagttaaaggagatgatgtcatttgtatttcaaggaatgctgctactctgggtggtccgttattcacattgcacgtctctcaagttcacattgatatgccaaccctaactgagaaggataaggaggttataagtacatggggagttcagaataagatcgactttctctcattatcttattgtcgacatgcagaagatgttcgccaggcccgtgagttgcttaacagttgtggtgacctctctcaaacacaaatatttgcgaagattgagaatgaagagggactaacccactttgacgaaattctacaagaagcagatggcattattctttctcgtgggaatttgggtatcgatctacctccggaaaaggtgtttttgttccaaaaggctgctctttacaagtgtaacatggctggaaagcctgccgttcttactcgtgttgtagacagtatgacagacaatctgcggccaactcgtgcagaggcaactgatgttgctaatgctgttttagatggaagtgatgcaattcttcttggtgctgagactcttcgtggattgtaccctgttgaaaccatatcaactgttggtagaatctgttgtgaggcagagaaagttttcaaccaagatttgttctttaagaagactgtcaagtatgttggagaaccaatgactcacttggaatctattgcttcttctgctgtacgggcagcaatcaaggttaaggcatccgtaattatatgcttcacctcgtctggcagagcagcaaggttgattgccaaataccgtccaactatgcccgttctctctgttgtcattccccgacttacgacaaatcagctgaagtggagctttagcggagcctttgaggcaaggcagtcacttattgtcagaggtcttttccccatgcttgctgatcctcgtcaccctgcggaatcaacaagtgcaacaaatgagtcggttcttaaagtggctctagaccatgggaagcaagccggagtgatcaagtcacatgacagagttgtggtctgtcagaaagtgggagatgcgtccgtggtcaaaatcatcgagctagaggattag

SEQ ID NO: 82 - protein, 474 aa, Arabidopsis thaliana
MSVARFDFSWCDADYHQETLENLKIAVKSTKKLCAVMLDTVGPELQVINKTEKAISLKADGLVTLTPSQDQEASSEVLPINFDGLAKAVKKGDTIFVGQYLFTGSETTSVWLEVEEVKGDDVICISRNAATLGGPLFTLHVSQVHIDMPTLTEKDKEVISTWGVQNKIDFLSLSYCRHAEDVRQARELLNSCGDLSQTQIFAKIENEEGLTHFDEILQEADGIILSRGNLGIDLPPEKVFLFQKAALYKCNMAGKPAVLTRVVDSMTDNLRPTRAEATDVANAVLDGSDAILLGAETLRGLYPVETISTVGRICCEAEKVFNQDLFFKKTVKYVGEPMTHLESIASSAVRAAIKVKASVIICFTSSGRAARLIAKYRPTMPVLSVVIPRLTTNQLKWSFSGAFEARQSLIVRGLFPMLADPRHPAESTSATNESVLKVALDHGKQAGVIKSHDRVVVCQKVGDASVVKIIELED

SEQ ID NO: 83 - DNA, 1791 bp, Arabidopsis thaliana
atgtctcagtctattcaattctccactccttcacacactcctcaccttctccatctccctcactcacaattcaaccgtcctctctcctctatctccttccgtcgcttccctctaacaaccatcaaatacacttccatcagagcctcctcgtcatcatctccttcaccggatctcgattcatcgtcctcatcatcatcctcgcaagtacttctctcacctaacggtactggtgctgtgaagtctgatgagagatccgttgtcgctacggcggttacgactgatacgtctgggattgaggttgatactgtgacggaagctgagcttaaggagaatggatttagaagtacgaggaggacgaagctgatctgtacgatcggaccggcgacttgtggatttgagcagcttgaggcgcttgctgtgggaggtatgaatgtggcaaggcttaatatgtgtcacggtacgcgtgattggcaccgcggtgtgattcgtagtgttcggaggcttaatgaggagaaaggctttgcggttgctattatgatggatactgaaggtagtgagattcatatgggagatcttggtggtgaagcttcagctaaagcagaggatggtgaggtttggactttcactgttagagcttttgattcttctcgtcctgaacgtaccattagtgttagctacgatggtttcgctgaagatgtaagagttggggatgaacttttggttgatggtgggatggtgagatttgaagtgattgagaagattggtcctgatgttaagtgtctatgtaccgatcctggattgttgcttcctcgagctaacttgacgttttggagagatggaagtcttgtacgagagcgtaatgccatgcttccaacaatttcttccaaggactggttggatattgattttggaattgctgaaggtgtggatttcattgctgtatcgtttgtcaagtcggctgaagtcattaatcaccttaaaagttatcttgctgctcgttcccgtggaggggaaattggagtgattgcaaagatcgagagtatcgattcactgaccaatttggaagaaattattctagcatcagatggggccatggttgcaagaggagatctgggagctcagatacctcttgagcaagttccagcagctcaacagagaatcgtccaagtatgcagagctcttaacaaacccgtcattgtcgcttcacagctattggagtccatgattgagtacccaactccaaccagagcagaagttgccgacgtgtctgaagcagtaagacaaagatcagatgcattgatgctctctggagaatcagctatgggacaattcccagacaaggcgctcacggttctaaggactgtcagtttaagaatcgagagatggtggagggaagagaaacgccatgagtctgtaccgcttcaagccataggctcttcattttcagacaaaatctcagaagagatctgtaactcagctgctaaaatggctaacaatcttggagtggacgcggttttcgtttacacaacgagcggacacatggcatcactggtctcccgatgtcgcccggactgcccgatctttgctttcacaaccacaacctcagtgagaagacgcttaaacctacaatggggacttatcccattccgtctcagcttctcagacgacatggaaagcaacttgaacaaaacattctcgttactgaaatcaagaggtatgatcaaatctggtgacctcgtgatcgcagtctcggacatgctgcaatcaatccaggtaatgaacgtcccgtaa

SEQ ID NO: 84 - protein, 596 aa, Arabidopsis thaliana
MSQSIQFSTPSHTPHLLHLPHSQFNRPLSSISFRRFPLTTIKYTSIRASSSSSPSPDLDSSSSSSSSQVLLSPNGTGAVKSDERSVVATAVTTDTSGIEVDTVTEAELKENGFRSTRRTKLICTIGPATCGFEQLEALAVGGMNVARLNMCHGTRDWHRGVIRSVRRLNEEKGFAVAIMMDTEGSEIHMGDLGGEASAKAEDGEVWTFTVRAFDSSRPERTISVSYDGFAEDVRVGDELLVDGGMVRFEVIEKIGPDVKCLCTDPGLLLPRANLTFWRDGSLVRERNAMLPTISSKDWLDIDFGIAEGVDFIAVSFVKSAEVINHLKSYLAARSRGGEIGVIAKIESIDSLTNLEEIILASDGAMVARGDLGAQIPLEQVPAAQQRIVQVCRALNKPVIVASQLLESMIEYPTPTRAEVADVSEAVRQRSDALMLSGESAMGQFPDKALTVLRTVSLRIERWWREEKRHESVPLQAIGSSFSDKISEEICNSAAKMANNLGVDAVFVYTTSGHMASLVSRCRPDCPIFAFTTTTSVRRRLNLQWGLIPFRLSFSDDMESNLNKTFSLLKSRGMIKSGDLVIAVSDMLQSIQVMNVP

SEQ ID NO: 85 - DNA, 1413 bp, Escherichia coli
atgaaaaagaccaaaattgtttgcaccatcggaccgaaaaccgaatctgaagagatgttagctaaaatgctggacgctggcatgaacgttatgcgtctgaacttctctcatggtgactatgcagaacacggtcagcgcattcagaatctgcgcaacgtgatgagcaaaactggtaaaaccgccgctatcctgcttgataccaaaggtccggaaatccgcaccatgaaactggaaggcggtaacgacgtttctctgaaagctggtcagacctttactttcaccactgataaatctgttatcggcaacagcgaaatggttgcggtaacgtatgaaggtttcactactgacctgtctgttggcaacaccgtactggttgacgatggtctgatcggtatggaagttaccgccattgaaggtaacaaagttatctgtaaagtgctgaacaacggtgacctgggcgaaaacaaaggtgtgaacctgcctggcgtttccattgctctgccagcactggctgaaaaagacaaacaggacctgatctttggttgcgaacaaggcgtagactttgttgctgcttcctttattcgtaagcgttctgacgttatcgaaatccgtgagcacctgaaagcgcacggcggcgaaaacatccacatcatctccaaaatcgaaaaccaggaaggcctcaacaacttcgacgaaatcctcgaagcctctgacggcatcatggttgcgcgtggcgacctgggtgtagaaatcccggtagaagaagttatcttcgcccagaagatgatgatcgaaaaatgtatccgtgcacgtaaagtcgttatcactgcgacccagatgctggattccatgatcaaaaacccacgcccgactcgcgcagaagccggtgacgttgcaaacgccatcctcgacggtactgacgcagtgatgctgtctggtgaatccgcaaaaggtaaatacccgctggaagcggtttctatcatggcgaccatctgcgaacgtaccgaccgcgtgatgaacagccgtctcgagttcaacaatgacaaccgtaaactgcgcattaccgaagcggtatgccgtggtgccgttgaaactgctgaaaaactggatgctccgctgatcgtggttgctactcagggcggtaaatctgctcgcgcagtacgtaaatacttcccggatgccaccatcctggcactgaccaccaacgaaaaaacggctcatcagttggtactgagcaaaggcgttgtgccgcagcttgttaaagagatcacttctactgatgatttctaccgtctgggtaaagaactggctctgcagagcggtctggcacacaaaggtgacgttgtagttatggtttctggtgcactggtaccgagcggcactactaacaccgcatctgttcacgtcctgtaa

SEQ ID NO: 86 - protein, 470 aa, Escherichia coli
MKKTKIVCTIGPKTESEEMLAKMLDAGMNVMRLNFSHGDYAEHGQRIQNLRNVMSKTGKTAAILLDTKGPEIRTMKLEGGNDVSLKAGQTFTFTTDKSVIGNSEMVAVTYEGFTTDLSVGNTVLVDDGLIGMEVTAIEGNKVICKVLNNGDLGENKGVNLPGVSIALPALAEKDKQDLIFGCEQGVDFVAASFIRKRSDVIEIREHLKAHGGENIHIISKIENQEGLNNFDEILEASDGIMVARGDLGVEIPVEEVIFAQKMMIEKCIRARKVVITATQMLDSMIKNPRPTRAEAGDVANAILDGTDAVMLSGESAKGKYPLEAVSIMATICERTDRVMNSRLEFNNDNRKLRITEAVCRGAVETAEKLDAPLIVVATQGGKSARAVRKYFPDATILALTTNEKTAHQLVLSKGVVPQLVKEITSTDDFYRLGKELALQSGLAHKGDVVVMVSGALVPSGTTNTASVHVL

SEQ ID NO: 87 - DNA, 1443 bp, Escherichia coli
atgtccagaaggcttcgcagaacaaaaatcgttaccacgttaggcccagcaacagatcgcgataataatcttgaaaaagttatcgcggcgggtgccaacgttgtacgtatgaacttttctcacggctcgcctgaagatcacaaaatgcgcgcggataaagttcgtgagattgccgcaaaactggggcgtcatgtggctattctgggtgacctccaggggcccaaaatccgtgtatccacctttaaagaaggcaaagttttcctcaatattggggataaattcctgctcgacgccaacctgggtaaaggtgaaggcgacaaagaaaaagtcggtatcgactacaaaggcctgcctgctgacgtcgtgcctggtgacatcctgctgctggacgatggtcgcgtccagttaaaagtactggaagttcagggcatgaaagtgttcaccgaagtcaccgtcggtggtcccctctccaacaataaaggtatcaacaaacttggcggcggtttgtcggctgaagcgctgaccgaaaaagacaaagcagacattaagactgcggcgttgattggcgtagattacctggctgtctccttcccacgctgtggcgaagatctgaactatgcccgtcgcctggcacgcgatgcaggatgtgatgcgaaaattgttgccaaggttgaacgtgcggaagccgtttgcagccaggatgcaatggatgacatcatcctcgcctctgacgtggtaatggttgcacgtggcgacctcggtgtggaaattggcgacccggaactggtcggcattcagaaagcgttgatccgtcgtgcgcgtcagctaaaccgagcggtaatcacggcgacccagatgatggagtcaatgattactaacccgatgccgacgcgtgcagaagtcatggacgtagcaaacgccgttctggatggtactgacgctgtgatgctgtctgcagaaactgccgctgggcagtatccgtcagaaaccgttgcagccatggcgcgcgtttgcctgggtgcggaaaaaatcccgagcatcaacgtttctaaacaccgtctggacgttcagttcgacaatgtggaagaagctattgccatgtcagcaatgtacgcagctaaccacctgaaaggcgttacggcgatcatcaccatgaccgaatcgggtcgtaccgcgctgatgacctcccgtatcagctctggtctgccaattttcgccatgtcgcgccatgaacgtacgctgaacctgactgctctctatcgtggcgttacgccggtgcactttgatagcgctaatgacggcgtagcagctgccagcgaagcggttaatctgctgcgcgataaaggttacttgatgtctggtgacctggtgattgtcacccagggcgacgtgatgagtaccgtgggttctactaataccacgcgtattttaacggtagagtaa

SEQ ID NO: 88 - protein, 480 aa, Escherichia coli
MSRRLRRTKIVTTLGPATDRDNNLEKVIAAGANVVRMNFSHGSPEDHKMRADKVREIAAKLGRHVAILGDLQGPKIRVSTFKEGKVFLNIGDKFLLDANLGKGEGDKEKVGIDYKGLPADVVPGDILLLDDGRVQLKVLEVQGMKVFTEVTVGGPLSNNKGINKLGGGLSAEALTEKDKADIKTAALIGVDYLAVSFPRCGEDLNYARRLARDAGCDAKIVAKVERAEAVCSQDAMDDIILASDVVMVARGDLGVEIGDPELVGIQKALIRRARQLNRAVITATQMMESMITNPMPTRAEVMDVANAVLDGTDAVMLSAETAAGQYPSETVAAMARVCLGAEKIPSINVSKHRLDVQFDNVEEAIAMSAMYAANHLKGVTAIITMTESGRTALMTSRISSGLPIFAMSRHERTLNLTALYRGVTPVHFDSANDGVAAASEAVNLLRDKGYLMSGDLVIVTQGDVMSTVGSTNTTRILTVE

SEQ ID NO: 89 - DNA, 1443 bp, Artificial sequence
  codon optimized B1854 sequence for expression in Zea mays
atgagcaggcgtcttcggcgcaccaagatcgttactacccttggacctgcgactgatcgggacaacaatctggagaaagttattgcggccggtgcgaatgtggtacgtatgaacttcagccacggaagtcctgaggaccacaagatgcgagccgacaaggttagagagattgctgcgaagcttggaaggcacgtagcgatactcggtgatctgcaaggtcccaagatccgggtgagcacgttcaaggaggggaaggtgttcctgaatatcggtgacaagtttcttctggacgctaacctcggcaagggagagggagacaaggagaaggtgggaatcgattacaagggacttccggctgacgtagtgcctggtgatatcttgctcctggacgacgggagagtgcaactcaaggtgttggaagttcaaggcatgaaggttttcaccgaggttaccgttggtggaccactgtccaacaacaaggggatcaacaaactcggaggtggcctgtctgcggaagcgcttaccgagaaggacaaagctgatattaagactgctgcgttgattggggtggactacctggcagtgagtttccctcgttgcggagaggatctgaactacgcacgacgcttggctcgtgacgcgggttgcgacgcaaagatcgtcgcgaaagtcgaacgagctgaggcagtctgctctcaagatgcaatggatgacatcatactcgccagcgacgtggtaatggtcgcacgtggtgatctaggggtggaaatcggagatcccgagctggttgggatccaaaaggcactgattcgtcgcgctaggcagctcaatcgagccgtgattaccgccacgcaaatgatggagtcaatgattacaaacccgatgccaacaagggccgaggtgatggatgttgcaaatgcggttctggatgggacggacgctgtgatgctttctgccgaaacggctgcgggacagtatccgtccgagactgttgccgctatggcaagggtttgcttaggggctgagaaaatcccctcgatcaacgtctcgaagcaccgtctcgacgtgcaattcgacaacgtcgaagaggcaatcgcaatgtcagcgatgtatgctgccaatcatctaaagggggtgaccgccataatcacgatgactgagtccggaagaaccgcactcatgacctcgaggatttcaagcggactcccgatctttgctatgtctcgccatgagcggactttgaaccttaccgcactctaccgtggggttacgccggtccactttgatagcgctaatgatggcgtcgctgcggcaagtgaagcagtcaacctactgagggataagggctacttgatgtcgggagacttggtgatcgtgacacaaggagacgtcatgtcaacggtcggctcaaccaatacaacgcgtatcttaacggtggagtga

SEQ ID NO: 90 - protein, 480 aa, Escherichia coli; identical to SEQ ID NO: 88

SEQ ID NO: 91 - DNA, 1443 bp, Escherichia coli
atgtccagaaggcttcgcagaacaaaaatcgttaccacgttaggcccagcaacagatcgcgataataatcttgaaaaagttatcgcggcgggtgccaacgttgtacgtatgaacttttctcacggctcgcctgaagatcacaaaatgcgcgcggataaagttcgtgagattgccgcaaaactggggcgtcatgtggctattctgggtgacctccaggggcccaaaatccgtgtatccacctttaaagaaggcaaagttttcctcaatattggggataaattcctgctcgacgccaacctgggtaaaggtgaaggcgacaaagaaaaagtcggtatcgactacaaaggcctgcctgcagacgtcgtgcctggtgacatcctgctgctggacgatggtcgcgtccagttaaaagtacgggaagttcagggcatgaaagtgttcaccgaagtcaccgtcggtggtcccctctccaacaataaaggtatcaacaaacttggcggcggtttgtcggctgaagcgctgaccgaaaaagacaaagcagacattaagactgcggcgttgattggcgtagattacctggctgtctccttcccacgctgtggcgaagatctgaactatgcccgtcgcctggcacgcgatgcaggatgtgatgcgaaaattgttgccaaggttgaacgtgcggaagccgtttgcagccaggatgcaatggatgacatcatcctcgcctctgacgtggtaatggttgcacgtggcgacctcggtgtggaaattggcgacccggaactggtcggcattcagaaagcgttgatccgtcgtgcgcgtcagctaaaccgagcggtaatcacggcgacccagatgatggagtcaatgattactaacccgatgccgacgcgtgcagaagtcatggacgtagcaaacgccgttctggatggtactgacgctgtgatgctgtctgcagaaactgccgctgggcagtatccgtcagaaactgttgcagccatggcgcgcgtttgcctgggtgcggaaaaaatcccgagcatcaacgtttctaaacaccgtctggacgttcagttcgacaatgtggaagaagctattgccatgtcagcaatgtacgcagctaaccacctgaaaggcgttacggcgatcattaccatgaccgaatcgggtcgtaccgcgctgatgacctcccgtatcagctctggtctaccaattttcgccatgtcgcgccatgaacgtacgctgaacctgactgctctctatcgtggcgttacgccggtgcactttgatagcgctaatgacggcgtagcagctgccagcgaagcggttaatctgctgcgcgataaaggttacttgatgtctggtgacctggtgattgtcacccagggcgacgtgatgagtaccgtgggttctactaataccacgcgtattttaacggtagagtaa

SEQ ID NO: 92 - protein, 480 aa, Escherichia coli
MSRRLRRTKIVTTLGPATDRDNNLEKVIAAGANVVRMNFSHGSPEDHKMRADKVREIAAKLGRHVAILGDLQGPKIRVSTFKEGKVFLNIGDKFLLDANLGKGEGDKEKVGIDYKGLPADVVPGDILLLDDGRVQLKVREVQGMKVFTEVTVGGPLSNNKGINKLGGGLSAEALTEKDKADIKTAALIGVDYLAVSFPRCGEDLNYARRLARDAGCDAKIVAKVERAEAVCSQDAMDDIILASDVVMVARGDLGVEIGDPELVGIQKALIRRARQLNRAVITATQMMESMITNPMPTRAEVMDVANAVLDGTDAVMLSAETAAGQYPSETVAAMARVCLGAEKIPSINVSKHRLDVQFDNVEEAIAMSAMYAANHLKGVTAIITMTESGRTALMTSRISSGLPIFAMSRHERTLNLTALYRGVTPVHFDSANDGVAAASEAVNLLRDKGYLMSGDLVIVTQGDVMSTVGSTNTTRILTVE

SEQ ID NO: 93 - DNA, 1443 bp, Escherichia coli
atgtccagaaggcttcgcagaactaaaatcgttaccacgttaggcccggcaacagatcgcgataataaccttgaaaaagttatcgcggcgggtgccaacgttgtacgtatgaatttttctcacggctcgcctgaagatcacaaaatgcgcgcggataaagttcgtgagattgcctcaaaactggggcgtcatgtggctattctgggtgacctccaggggcccaaaatccgtgtatccacctttaaagaaggcaaagttttcctcaatattggggataaattcctgctcgacgccaacctgggtaaaggtgaaggcgacaaagaaaaagtcggtatcgactacaaaggcctgcctgctgacgttgtgcctggtgacatcctgctgctggacgatggtcgcgtccagttaaaagtactggaagtccagggcatgaaagtgttcaccgaagtgaccgtcggtggtcccctctccaacaataaaggtatcaacaaacttggcggcggtttgtcagctgaagcgctgaccgaaaaagacaaagcagacattaagactgcggcgttgattggcgtagattacctggctgtctccttcccacgctgcggcgaagatctgaactatgcccgtcgcctggcacgcgatgcaggatgtgatgcgaaaattgttgccaaggttgaacgtgcggaagccgtttgcagccaggaggcaatggatgacatcatcctcgcctctgacgtggtaatggttgctcgcggcgacctcggtgtggaaattggcgatccggaactggtcggcattcagaaagcgttgatccgtcgtgcgcgtcagctaaaccgcgcggtaatcacggcgacccagatgatggaatcaatgattactaacccgatgccgacgcgtgcagaagtcatggacgtagcaaacgccgttctggatggtactgacgctgtgatgctgtcggcagaaactgctgctggtcaatacccgtcagaaactgttgcagccatggcgcgcgtttgcctgggggcggaaaaaatcccgagcatcaacgtttctaaacaccgtctggacgttcagttcgacaatgtggaagaagctattgccatgtcagcaatgtacgcggctaaccacttgaaaggcgttacggcgatcatcaccatgaccgaatcgggtcgtaccgcgctgatgacctcccgtatcagctctggtctgccaattttcgccatgtcacgccatgaacgtacgctgaacctgactgctctctatcgcggcgttacgccggtgcactttgatagcgctaatgacggtgtagcagctgccagcgaagcggttaatctgctgcgtgataaaggttacttgatgtctggtgacctggtgattgtcacccagggcgacgtgatgagtaccgtgggttctactaataccacgcgtattttaacggtagagtaa

SEQ ID NO: 94 - protein, 480 aa, Escherichia coli
MSRRLRRTKIVTTLGPATDRDNNLEKVIAAGANVVRMNFSHGSPEDHKMRADKVREIASKLGRHVAILGDLQGPKIRVSTFKEGKVFLNIGDKFLLDANLGKGEGDKEKVGIDYKGLPADVVPGDILLLDDGRVQLKVLEVQGMKVFTEVTVGGPLSNNKGINKLGGGLSAEALTEKDKADIKTAALIGVDYLAVSFPRCGEDLNYARRLARDAGCDAKIVAKVERAEAVCSQEAMDDIILASDVVMVARGDLGVEIGDPELVGIQKALIRRARQLNRAVITATQMMESMITNPMPTRAEVMDVANAVLDGTDAVMLSAETAAGQYPSETVAAMARVCLGAEKIPSINVSKHRLDVQFDNVEEAIAMSAMYAANHLKGVTAIITMTESGRTALMTSRISSGLPIFAMSRHERTLNLTALYRGVTPVHFDSANDGVAAASEAVNLLRDKGYLMSGDLVIVTQGDVMSTVGSTNTTRILTVE

SEQ ID NO: 95 - DNA, 1443 bp, Photorhabdus luminescens
  Photorhabdus luminescens subsp. laumondii TTO1
atgtccagacggctcagaagaactaagattgttactacacttggtccggctaccgaccgcgataataatcttgaaaagattattgctgcgggtgcaaacgtagtccgccttaacttttcccacggtaccgccgaagatcatctccagcgagccagcaaagtccgcgagattgcagcccgcctggggtgccatgtcgctattcttggcgatcttcaaggacctaaaatccgcgtatcaacgtttaaagagggcaaaattttcctgaatatcggagataaatttctccttgatgccaatcttggtaaaggcgaaggcgataaggagaaagtcggtatcgattacaaaggactacccacggatgttgtaccgggcgatattttgttgctggatgacggacgtgttcaactcaaagtattagacgttcagggaatgaaagtcttcacggaagtcactgtaggcggcccgctatctaacaataaaggcattaacaaactgggtggtggattatccgcagaagccctaactgaaaaagataaagaagatattattacggcggccagaatcggcgttgattaccttgccgtctctttccctcgcaccggtgaagatcttaactatgcccgccgtctggcacgagacgcaggctgtgaaacgcagatcgtggcaaaagttgaacgcgcagaagccgttagcagtgataaaaccatcgatgaaatcattctggcttctgatgtggtcatggttgcccgtggtgaccttggcgtagaaatcggcgatccagagttagttggcgttcagaaaaaattaattcgccgtgcccgccagctaaatcgtgtagttattaccgcgacccagatgatggaatctatgatcaccaatccaatgcccacccgtgcagaagtgatggatgtggcaaatgccgttctcgacggtactgacgccgtaatgctctccgctgaaaccgcagcgggccaataccctgccgaaaccgttgccgcaatggcacgagtctgtctcggagcagaaaaaatgcctggcctcaacgtatcaaaacatcggctagacacaatttttgacagtattgaagaagccattgcgatgtctaccatgtacgcggcaaaccacttaaatggagttaaagccattattgccatgaccgaatcaggccgcaccactcgcatcatgtctcgcattagttctggtctcccgatattctctatgtcccgtcatgagaaaaccttaaaccaaacggcactttaccgtggcgttacaccggtttattgcagtagtcatactgacggcattacggcggccaatgaagcagttaatcgcctgcgtgataaaggttatctagtttccggtgatcttgttctggttactcagggtgatcagatggggacgattggcagtactaacacctgccgtattcttgaagtggaataa

SEQ ID NO: 96 - protein, 480 aa, Photorhabdus luminescens
  Photorhabdus luminescens subsp. laumondii TTO1
MSRRLRRTKIVTTLGPATDRDNNLEKIIAAGANVVRLNFSHGTAEDHLQRASKVREIAARLGCHVAILGDLQGPKIRVSTFKEGKIFLNIGDKFLLDANLGKGEGDKEKVGIDYKGLPTDVVPGDILLLDDGRVQLKVLDVQGMKVFTEVTVGGPLSNNKGINKLGGGLSAEALTEKDKEDIITAARIGVDYLAVSFPRTGEDLNYARRLARDAGCETQIVAKVERAEAVSSDKTIDEIILASDVVMVARGDLGVEIGDPELVGVQKKLIRRARQLNRVVITATQMMESMITNPMPTRAEVMDVANAVLDGTDAVMLSAETAAGQYPAETVAAMARVCLGAEKMPGLNVSKHRLDTIFDSIEEAIAMSTMYAANHLNGVKAIIAMTESGRTTRIMSRISSGLPIFSMSRHEKTLNQTALYRGVTPVYCSSHTDGITAANEAVNRLRDKGYLVSGDLVLVTQGDQMGTIGSTNTCRILEVE

SEQ ID NO: 97 - DNA, 1443 bp, Photorhabdus asymbiotica
  Photorhabdus asymbiotica subsp. asymbiotica ATCC 43949
atgtccagacggctcagaagaactaagattgttactacccttggtccggctaccgaccgcgataataaccttgaaaagattattacagcaggtgcaaacgtagtccgcctcaacttttcccacggtacagcagaagatcacatccagcgtgccaataaagtgcgcgaaatagctgcccgccttggccgccatgttgctattcttggcgatcttcaaggacctaaaattcgcgtatcaacttttaaagagggcaaaattttcctgaatgtcggcgataaatttctacttgatgccaaccttggtaaaggcgaaggcaataaagaaaaagtcggcatcgattacaaaggattacccgctgatgtcgtaccgggtgatattctgctgctagatgatggacgtgttcaactgaaagtattagaagtgcaggccatgaaagtattcacggaagttactgttggtggcccgctgtctaacaataaaggcatcaacaagctcggtggtggtttatccgctgaagcgctgaccgaaaaggataaagaagacattattaccgccgccagaattggtgttgattacctcgcaatctcttttcctcgtactggtgaagatctcaattatgcccgtcgtttggcacgggatgctggttgtgaaacgcaaatcgtggcaaaagttgagcgtgcagaagccgtcagcagtgatgaaatcattgatgaaattattctggcttccgatgttgtgatggttgcccgtggtgatctcggcgtggaaatcggtgatcctgaactggttggcgttcagaaaaaactcattcgccgtgcacgccagttgaatcgtgtggtcattaccgctacccaaatgatggaatccatgatcaccaatccaatgcctacccgcgcagaagttatggacgtagcgaacgcagtacttgacggtaccgacgcagtgatgctttctgctgaaacagcctcaggtcaataccctgccgaaacggttgccgctatggctcaggtctgtctgggtgccgaaaaaatgccaggactcaatgtatccaaacatcggttagacaccattttcgaaagtaccgaagaagccattgctatgtccaccatgtacgccgcaaaccatctaaaaggtgtgaaagcgattatcgcactgaccgaatcaggtcgcaccacacggatgatgtcgcgcatcagttccggcctgcacattttctctatgtcccgtcatgaaaagacgctgaatcaaacagcgctttaccgcggcgttacaccggtttattgcagtagtcatactgacggtataacagccgctaatgaagccatcaaccgtctgcgtgataaaggttatctgatttccggcgaccttgttctggttactcaaggcgaccagatgggcacaattggcagcactaacacctgccgtattcttgaagtagaataa

SEQ ID NO: 98 - protein, 480 aa, Photorhabdus asymbiotica
  Photorhabdus asymbiotica subsp. asymbiotica ATCC 43949
MSRRLRRTKIVTTLGPATDRDNNLEKIITAGANVVRLNFSHGTAEDHIQRANKVREIAARLGRHVAILGDLQGPKIRVSTFKEGKIFLNVGDKFLLDANLGKGEGNKEKVGIDYKGLPADVVPGDILLLDDGRVQLKVLEVQAMKVFTEVTVGGPLSNNKGINKLGGGLSAEALTEKDKEDIITAARIGVDYLAISFPRTGEDLNYARRLARDAGCETQIVAKVERAEAVSSDEIIDEIILASDVVMVARGDLGVEIGDPELVGVQKKLIRRARQLNRVVITATQMMESMITNPMPTRAEVMDVANAVLDGTDAVMLSAETASGQYPAETVAAMAQVCLGAEKMPGLNVSKHRLDTIFESTEEAIAMSTMYAANHLKGVKAIIALTESGRTTRMMSRISSGLHIFSMSRHEKTLNQTALYRGVTPVYCSSHTDGITAANEAINRLRDKGYLISGDLVLVTQGDQMGTIGSTNTCRILEVE

SEQ ID NO: 99 - DNA, 1437 bp, Actinobacillus succinogenes
  Actinobacillus succinogenes 130Z
atgtctagaagattaagaagaacgaaaatcgtatgtacgatgggacctgcgaccgacaaaggcaacaaccttgaaaaaatcattgccgcaggtgcaaacgtagtacgtatgaacttctcccacggaacgccggaagatcatatcgcccgtgccgataaagtacgagaaattgcgaaaaaattaggcaaacacgtcgcaatcttgggtgatttacaaggccctaaaatccgggtttccactttcaaagaaggcaaaattttcttaagtatcggtgataaatttattttagatgcggatttaccgaaaggtgaaggtaatcaggaagcggtcggattggattacaaaactttaccgcaggatgtcgtgccgggcgatattttattgttagacgacggacgcgttcagttaaaagtattatctacggacggcgcgaaagtgtttaccgaagtaacggtaggcggtcctttgtcaaacaacaaaggtatcaataaattaggcggcggtttatcggcggacgcattaaccgagaaagataaagcggatatcgttaccgcggcacgtatcggcgtagattatctggcggtgtctttcccgcgttcaagcgcagacttaaattatgcccgcgaattggcggaagccgccggcttagatgcaaaaatcgtagcgaaagtagaacgtgcggaaaccgtggcgactgacgaagctatggacgatattatcttagcgtcggacgttatcatggttgcccgcggtgacttgggggtggaaatcggtgacccggaattagtgggcgttcagaaaaaattaatccgtcgttcacgtcagttaaaccgagtggttatcactgcgactcagatgatggaatcgatgatcagcaacccgatgcctacccgtgcggaagtaatggacgtcgcgaatgccgtgttggacggtaccgatgccgtaatgctttcagcggaaaccgcagccggtcaatatccgtccgaaacggtggcggctatggcgaaagtggcgttgggggcagaaaaaatgccgagtatcaacgtatctaaacaccgtatggacggtcaattcgccactatcgaagaatccgtagcgatgtcttccatgtatgcggcaaaccacatgaaaggtgtggcggcgattattaccttgaccaacagcggccgtacggcgcgtttaatgtcgcgtatcagttccggtttaccgatttttgccttatcgcgtaacgaatccactttaaacttatgcgcgttataccgcggtgtaacgccgattctgttcgaacaggaatcccgcaccgtacacagcgcgaaagcggcggtcaatctgttgaaagaaaaaggattcttggtgtcgggcgacttggtgttattaactcagggggacgcactaggcacatcaactaacgtatgccgcacattaatcgttgaataa

SEQ ID NO: 100 - protein, 478 aa, Actinobacillus succinogenes
  Actinobacillus succinogenes 130Z
MSRRLRRTKIVCTMGPATDKGNNLEKIIAAGANVVRMNFSHGTPEDHIARADKVREIAKKLGKHVAILGDLQGPKIRVSTFKEGKIFLSIGDKFILDADLPKGEGNQEAVGLDYKTLPQDVVPGDILLLDDGRVQLKVLSTDGAKVFTEVTVGGPLSNNKGINKLGGGLSADALTEKDKADIVTAARIGVDYLAVSFPRSSADLNYARELAEAAGLDAKIVAKVERAETVATDEAMDDIILASDVIMVARGDLGVEIGDPELVGVQKKLIRRSRQLNRVVITATQMMESMISNPMPTRAEVMDVANAVLDGTDAVMLSAETAAGQYPSETVAAMAKVALGAEKMPSINVSKHRMDGQFATIEESVAMSSMYAANHMKGVAAIITLTNSGRTARLMSRISSGLPIFALSRNESTLNLCALYRGVTPILFEQESRTVHSAKAAVNLLKEKGFLVSGDLVLLTQGDALGTSTNVCRTLIVE

SEQ ID NO: 101 - protein, 13 aa, Artificial Sequence
  Pyruvate kinase active site
  misc_feature (1)..(1): Xaa is Leu, Ile, Val, Ala or Cys
  misc_feature (2)..(2): Xaa can be any naturally occurring amino acid
  misc_feature (3)..(3): Xaa is Leu, Ile, Val or Met
  misc_feature (4)..(4): Xaa is Leu, Ile, Val or Met
  misc_feature (5)..(5): Xaa is Ser, Ala, Pro, Cys or Val
  misc_feature (7)..(7): Xaa is Leu, Ile or Val
  misc_feature (9)..(9): Xaa is Asn, Lys, Arg, Ser or Thr
  misc_feature (10)..(10): Xaa can be any naturally occurring amino acid
  misc_feature (11)..(11): Xaa is Asp, Glu, Gln, His or Ser
  misc_feature (12)..(12): Xaa is Gly, Ser, Thr or Ala
  misc_feature (13)..(13): Xaa is Leu, Ile, Val or Met
XXXXXKXEXXXXX

SEQ ID NO: 102 - protein, 92 aa, Artificial sequence
  Pfam domain PF00224 consensus sequence
  misc_feature (2)..(3): Xaa can be any naturally occurring amino acid
  misc_feature (5)..(5): Xaa can be any naturally occurring amino acid
  misc_feature (6)..(6): Xaa is Asp, Glu or Gln
  misc_feature (7)..(7): Xaa can be any naturally occurring amino acid
  misc_feature (8)..(8): Xaa is Gly, Leu or Pro
  misc_feature (9)..(9): Xaa can be any naturally occurring amino acid
  misc_feature (10)..(10): Xaa is Glu or Pro
  misc_feature (11)..(11): Xaa can be any naturally occurring amino acid
  misc_feature (12)..(12): Xaa is Ile, Leu or Val
  misc_feature (13)..(15): Xaa can be any naturally occurring amino acid
  misc_feature (17)..(37): Xaa can be any naturally occurring amino acid
  misc_feature (38)..(38): Xaa can be any naturally occurring amino acid or no amino acid
  misc_feature (41)..(43): Xaa can be any naturally occurring amino acid
  misc_feature (44)..(44): Xaa is Leu or Pro
  misc_feature (45)..(45): Xaa can be any naturally occurring amino acid
  misc_feature (51)..(51): Xaa is Ala or Val
  misc_feature (52)..(52): Xaa can be any naturally occurring amino acid
  misc_feature (54)..(54): Xaa is Ile or Val
  misc_feature (55)..(55): Xaa is Ala or Ser
  misc_feature (56)..(56): Xaa can be any naturally occurring amino acid
  misc_feature (58)..(58): Xaa is Ile or Val
  misc_feature (59)..(59): Xaa can be any naturally occurring amino acid
  misc_feature (60)..(60): Xaa is Asp, Glu or Gln
  misc_feature (61)..(61): Xaa can be any naturally occurring amino acid
  misc_feature (62)..(62): Xaa is Ala, Ser or Thr
  misc_feature (64)..(64): Xaa is Ala, Cys or Gly
  misc_feature (65)..(65): Xaa is Ile, Leu or Val
  misc_feature (66)..(66): Xaa is Leu or Met
  misc_feature (68)..(68): Xaa is Gly or Ser
  misc_feature (69)..(69): Xaa is Ala or Gly
  misc_feature (71)..(71): Xaa is Ser or Thr
  misc_feature (72)..(72): Xaa is Ala or Leu
  misc_feature (73)..(73): Xaa can be any naturally occurring amino acid
  misc_feature (75)..(75): Xaa can be any naturally occurring amino acid
  misc_feature (76)..(76): Xaa is Phe, Trp or Tyr
  misc_feature (78)..(79): Xaa can be any naturally occurring amino acid
  misc_feature (80)..(80): Xaa is Ala or Thr
  misc_feature (81)..(81): Xaa is Ala, Ile, Leu or Val
  misc_feature (82)..(83): Xaa can be any naturally occurring amino acid
  misc_feature (84)..(84): Xaa is Leu, Met or Val
  misc_feature (85)..(86): Xaa can be any naturally occurring amino acid
  misc_feature (87)..(87): Xaa is Ile or Val
  misc_feature (88)..(88): Xaa is Ala, Cys or Ser
  misc_feature (89)..(91): Xaa can be any naturally occurring amino acid
  misc_feature (92)..(92): Xaa is Asp or Glu
GXXGXXXXXXXXXXXQXXXXXXXXXXXXXXXXXXXXXXSMXXXXXPTRAEXXDXXXAXXXXXDXXXLXXEXXXGXXPXXXXXXXXXXXXXXX

SEQ ID NO: 103 - protein, 22 aa, Artificial Sequence
  Pfam domain PF02887 consensus sequence
  misc_feature (2)..(2): Xaa can be any naturally occurring amino acid
  misc_feature (3)..(3): Xaa is Asp, Gly, Ser or Thr
  misc_feature (5)..(10): Xaa can be any naturally occurring amino acid
  misc_feature (11)..(13): Xaa can be any naturally occurring amino acid or no amino acid
  misc_feature (15)..(17): Xaa can be any naturally occurring amino acid
  misc_feature (18)..(18): Xaa is Gly, Pro or Thr
  misc_feature (19)..(21): Xaa can be any naturally occurring amino acid
  misc_feature (22)..(22): Xaa is Phe, Ile, Leu or Val
TXXGXXXXXXXXXRXXXXXXXX

SEQ ID NO: 104 - DNA, 1198 bp, Zea mays
tcccgtgtccgtcaatgtgatactactagcatagtactagtaccatgcatacacacagcaggtcggccgcctggatggatcgatgatgatactacatcatcctgtcatccatccaggcgatctagaaggggcgtggctagctagcaaactgtgaccggtttttctacgccgataataatactttgtcatggtacagacgtacagtactggttatatatatctgtagatttcaactgaaaagctaggatagctagattaattcctgagaaacacagataaaattcgagcttggctatagatgacaaaacggaagacgcatgcattggacgacgtatgcaatgcgagcgcgtctcgtgtcgtcccgtccaagtctggcgatctcacgccacgtgctcaacagctcaaggactgttcgtcaccagcgttaaattcattgaagggatgacgcatttcggcatttgtcattgcttgtagctatatatatatatccaacagatttctctcaagcttttgtatgcgtgaatgtaaagtctagcttatacgacagcacgtgcagatatattaacgtcattattaggtggagagcaagatgcatgatctggtagaaattgtcgaaaacacaagagagagtgaagtgcacacttctggtataggagtgtatacgccgctggttggtgggcaatgcgcgccgcaatattggccaatgaaacctagcaacgcccactcgccacgccccatgaatggcccccgcacgacagcgagccagccagtgcccgcgcgcggcccagccggagtcggcggaacgcgccacgggggacaaggcgcccgagggccgaggcagcgcggcatggcaagcaagccgaagcgggcaagcgacctgcatgcagcccctgcacctcgccctcgtcagtcgtcccagcctcccactggaatccacccaacccgcccttcctctacaaagcacgcgccccgcgactcgcctccgcctacgtgtcggcagcgtccccgccggtcgcccacgtaccccgccccgttctcccacgtgcccctccctctgcgcgcgtccgattggctgacccgcccttcttaagccgcgccagcctcctgtccgggccccaacgccgtgctccgtcgtcgtctccgcccccagagtgatcgagcccactgacctggcccccgagcctcagctcgtgagtcc

SEQ ID NO: 105 - DNA, 1526 bp, Zea mays
cagggagagctatgaggcgtatgtcctcaaagccactttgcattgtgtgaaaccaatatcgatctttgttacttcatcatgcgtgaacatttgtggaaactactagcttacaagcattagtgacagctcagaaaaaagttatctctgaaaggtttcatgtgtaccgtgggaaatgagaaatgttgccaactcaaacaccttcaatatgttgtttgcaggcaaactcttctggaagaaaggtgtctaaaactatgaacgggttacagaaaggtataaaccacggctgtgcattttggaagtatcatctatagatgtctgttgaggggaaagccgtacgccaacgttatttactcagaaacagcttcaacacacagttgtctgctttatgatggcatctccacccaggcacccaccatcacctatctctcgtgcctgtttattttcttgccctttctgatcataaaaaatcattaagagtttgcaaacatgcataggcatatcaataattcaatatgctcatttattaatttgctagcagatcatcttcctactctttactttatttattgtttgaaaaatatgtcctgcacctagggagctcgtatacagtaccaatgcatcttcattaaatgtgaatttcagaaaggaagtaggaacctatgagagtatttttcaaaattaattagcggcttctattatgtttatagcaaaggccaagggcaaaattggaacactaatgatggttggttgcatgagtctgtcgattacttgcaagaaatgtgaacctttgtttctgtgcgtgggcataaaacaaacagcttctagcctcttttacggtacttgcacttgcaagaaatgtgaactccttttcatttctgtatgtggacataatgccaaagcatccaggctttttcatggttgttgatgtctttacacagttcatctccaccagtatgccctcctcatactctatataaacacatcaacagcatcgcaattagccacaagatcacttcgggaggcaagtgcgattttgatcttgcagccacctttttttgttctgttgtaagtatactttcccttaccatctttatctgttagtttaatttgtaattgggaagtattagtggaaagaggatgagatgctatcatctatgtactctgcaaatgcatctgacgttatatgagctgcttcatataatttgaattgctccattcttgccgacaatatattgcaaggtatatgcctagttccatcaaaagttctgttttttcattctaaaagcattttagtggcacacaatttttgtccatgagggaaagggaatctgttttggttactttgcttgaggtgcattcttcatatgtccagttttatggaagtaataaacttcagtttggtcataagatgtcatattaaagggcaaacatatattcaatgttcaattcatcgtaaatgttccctttttgtaaaagattgcatactcatttatttgagttgcaggtgtatctagtagttggaggag

SEQ ID NO: 106 - DNA, 1136 bp, Zea mays
aagcttgctactttctttccttaatgttgatttcccctttgttagatgttctttgtgttatatacactctgtatacaaggatgcgatacacacatcagctagtcctaatgatgccaccgactttacttgaggaaaaggaaacaaatatgatgtggccatcacattctcaataacaatgaccatgtgcgcaatgacataccatcatatttgatatcataaaaataaatttattatcaaagtaaacatatagttcatatatcagatattaaagtgataagaacaaatattacattttatcttatataaaatgacgaaaggtacgagttgaaaaggggtccaaccccttttttatagcttgttcggttgcttgttctccttcggctagcgaggtggtagaatgtgagagtgttgcgcgtggattcccgtcgtagtgttcttaggtgatttctcacggcccatctgtgatatagcgactcattatgtggtgtaatagcccattgggagaaggggagagatatagatctacgtgatttgcgcgtgatgcacgacgaacgaaactggtggtttaaagtagtagaggtttgtcattagtggtgtaagtggtacatatattatccgttcatattcgaatttgatccgtataagggggctaagatctaatccgtatacaagtccaagtattaagtatccgatccatatcggatctttatccgtatccgtatactcaaaatttgatgtttaagattttaatatatatttaaactttataggaactcgataatatttgtatctgatttgaattgtgaaaacaaatatggaacgattaatttcagtctatatccgttccgatatttgtcatgctttgctaaaaatacctttacaaggcatcttgtgcagattatatattaatctgaaatcagttagagaagcctacaaatttgaccaaatgccgagtcatccggcttatcccctttccaactttcagttctgcaagcgccagaaatcgtttttcatctacattgtctttgttgcctgcatacatctataaataggacctgctagatcaatcgcagtccatcggcctcagtcgcacatatctactatactatactctaggaagcaaggacaccaccgcc

SEQ ID NO: 107 - DNA, 856 bp, Zea mays
cgtagcaatgcacgggcatataactagtgcaacttaatacatgtgtgtattaagatgaataagagggtatccaaataaataacttgttcgcttacgtctggatcgaaaggggttggaaacgattaaatctcttcctagtcaaaattaaatagaaggagatttaatcgatttctcccaatccccttcgatccaggtgcaaccgaataagtccttaaatgttgaggaacacgaaacaaccatgcattggcatgtaaagctccaagaattcgttgtatccttaacaactcacagaacatcaaccaaaattgcacgtcaagggtattgggtaagaaacaatcaaacaaatcctctctgtgtgcaaagaaacacggtgagtcatgccgagatcatactcatctgatatacatgcttacagctcacaagacattacaaacaactcatattgcattacaaagatcgtttcatgaaaaataaaataggccggacaggacaaaaatccttgacgtgtaaagtaaatttacaacaaaaaaaaagccatatgtcaagctaaatctaattcgttttacgtagatcaacaacctgtagaaggcaacaaaactgagccacgcagaagtacagaatgattccagatgaaccatcgacgtgctacgtaaagagagtgacgagtcatatacatttggcaagaaaccatgaagctgcctacagccgtctcggtggcataagaacacaagaaattgtgttaattaatcaaagctataaataacgctcgcatgcctgtgcacttctccatcaccaccactgggtcttcagaccattagctttatctactccagagcgcagaagaacccgatcgaca

SEQ ID NO: 108 - DNA, 1401 bp, Zea mays
ccgagtgccatccttggacactcgataaagtatattttattttttttattttgccaaccaaactttttgtggtatgttcctacactatgtagatctacatgtaccattttggcacaattacatatttacaaaaatgttttctataaatattagatttagttcgtttatttgaatttcttcggaaaattcacatttaaactgcaagtcactcgaaacatggaaaaccgtgcatgcaaaataaatgatatgcatgttatctagcacaagttacgaccgatttcagaagcagaccagaatcttcaagcaccatgctcactaaacatgaccgtgaacttgttatctagttgtttaaaaattgtataaaacacaaataaagtcagaaattaatgaaacttgtccacatgtcatgatatcatatatagaggttgtgataaaaatttgataatgtttcggtaaagttgtgacgtactatgtgtagaaacctaagtgacctacacataaaatcatagagtttcaatgtagttcactcgacaaagactttgtcaagtgtccgataaaaagtactcgacaaagaagccgttgtcgatgtactgttcgtcgagatctctttgtcgagtgtcacactaggcaaagtctttacggagtgtttttcaggctttgacactcggcaaagcgctcgattccagtagtgacagtaatttgcatcaaaaatagctgagagatttaggccccgtttcaatctcacgggataaagtttagcttcctgctaaactttagctatatgaattgaagtgctaaagtttagtttcaattaccaccattagctctcctgtttagattacaaatggctaaaagtagctaaaaaatagctgctaaagtttatctcgcgagattgaaacagggccttaaaatgagtcaactaatagaccaactaattattagctattagtcgttagcttctttaatctaagctaaaaccaactaatagcttatttgttgaattacaattagctcaacggaattctctgttttttctataaaaaaagggaaactgcccctcatttacagcaaattgtccgctgcctgtcgtccagatacaatgaacgtacctagtaggaactcttttacacgctcggtcgctcgccgcggatcggagtcccaggaacacgacaccactgtgtaacacgacaaagtctgctcagaggcggccacaccctggcgtgcaccgagccggagcccggataagcacggtaaggagagtacggcgggacgtggcgacccgtgtgtctgctgccacgcagccttcctccacgtagccgcgcggccgcgccacgtaccagggcccggcgctggtataaatgcgcgctacctccgctttagttctgcatacagccaacccaa

SEQ ID NO: 109 - DNA, 1421 bp, Sugarcane bacilliform virus
gaagttgaagacaaagaaggtcttaaatcctggctagcaacactgaactatgccagaaaccacatcaaagatatgggcaagcttcttggcccattatatccaaagacctcagagaaaggtgagcgaaggctcaattcagaagattggaagctgatcaataggatcaagacaatggtgagaacgcttccaaatctcactattccaccagaagatgcatacattatcattgaaacagatgcatgtgcaactggatggggagcagtatgcaagtggaagaaaaacaaggcagacccaagaaatacagagcaaatctgtaggtatgccagtggaaaatttgataagccaaaaggaacctgtgatgcagaaatctatggggttatgaatggcttagaaaagatgagattgttctacttggacaaaagagagatcacagtcagaactgacagtagtgcaatcgaaaggttctacaacaagagtgctgaacacaagccttctgagatcagatggatcaggttcatggactacatcactggtgcaggaccagagatagtcattgaacacataaaagggaagagcaatggtttagctgacatcttgtccaggctcaaagccaaattagctcagaatgaaccaacggaagagatgatcctgcttacacaagccataagggaagtaattccttatccagatcatccatacactgagcaactcagagaatggggaaacaaaattctggatccattccccacattcaagaaggacatgttcgaaagaacagagcaagcttttatgctaacagaggaaccagttctactctgtgcatgcaggaagcctgcaattcagttagtgtccagaacatctgccaacccaggaaggaaattcttcaagtgcgcaatgaacaaatgccattgctggtactgggcagatctcattgaagaacacattcaagacagaattgatgaatttctcaagaatcttgaagttctgaagaccggtggcgtgcaaacaatggaggaggaacttatgaaggaagtcaccaagctgaagatagaagagcaggagttcgaggaataccaggccacaccaagggctatgtcgccagtagccgcagaagatgtgctagatctccaagacgtaagcaatgacgattgaggaggcattgacgtcagggatgaccgcagcggagagtactgggcccattcagtggatgctccactgagttgtattattgtgtgcttttcggacaagtgtgctgtccactttcttttggcacctgtgccactttattccttgtctgccacgatgcctttgcttagcttgtaagcaaggatcgcagtgcgtgtgtgacaccaccccccttccgacgctctgcctatataaggcaccgtctgtaagctcttacgatcatcggtagttcacca

SEQ ID NO: 110 - DNA, 300 bp, Sugarcane bacilliform virus
agatctccaagacgtaagcaatgacgattgaggaggcattgacgtcagggatgaccgcagcggagagtactgggcccattcagtggatgctccactgagttgtattattgtgtgcttttcggacaagtgtgctgtccactttcttttggcacctgtgccactttattccttgtctgccacgatgcctttgcttagcttgtaagcaaggatcgcagtgcgtgtgtgacaccaccccccttccgacgctctgcctatataaggcaccgtctgtaagctcttacgatcatcggtagttcacca

SEQ ID NO: 111 - DNA, 583 bp, Orzya sativa
gtaagatccgatcaccatcttctgaatttctgttcttgatctgtcatgtataataactgtctagtcttggtgttggtgagatggaaattcggtggatctcggaagggatattgttcgtttgctggggttttttttgtgtgttgtgatccgtagagaatttgtgtttatccatgttgttgatcttggtatgtattcatgacatattgacatgcatgtgttgtatgtgtcatatgtgtgcctctccttgggatttgttttggataatagaacatgttatggactcaatagtctgtgaacaaatctttttttagatggtggccaaatctgatgatgatctttcttgagaggaaaaagttcatgatagaaaaatcttttttgagatggtggcttaatgtgatgatgatctttcttgagaggaaaaaaaagattcattataggagattttgatttagctcctttccaccgatattaaatgaggagcatgcatgctgattgctgataaggatctgatttttttatcccctcttctttgaacagacaagaaataggctctgaatttctgattgattatttgtacatgcag

SEQ ID NO: 112 - DNA, 331 bp, Oryza sativa
gtaagttctggctttcttgcttttggataaattttgcttcctttcttaacttgagcacaagcttgtgttatatgtggtgtggaatcttggttgccatgttgtgaggatttagctagagagtcaagaaagaggaatatatgctttatgtagataggagtaggatctctgggtctttaaacatcaccatgacaagcaaagataagaacaggagagcagttcttgattattatttttcttctcatcaagaaattaagccggagatagacatggcagctgcacgcagtgattcacttcttgatttcttgatttgggttgttgcgtttgtgtccag

SEQ ID NO: 113 - DNA, 153 bp, Silene pratensis
atggcttctacactctctaccctctcggtgagcgcatcgttgttgccaaagcaacaaccgatggtcgcctcatcgctaccaaccaacatgggccaagccttgtttggactgaaagccggttctcgtggcagagtgactgcaatggccacatac

SEQ ID NO: 114 - protein, 51 aa, Silene pratensis
MASTLSTLSVSASLLPKQQPMVASSLPTNMGQALFGLKAGSRGRVTAMATY

SEQ ID NO: 115 - DNA, 253 bp, Agrobacterium tumefaciens
gatcgttcaaacatttggcaataaagtttcttaagattgaatcctgttgccggtcttgcgatgattatcatataatttctgttgaattacgttaagcatgtaataattaacatgtaatgcatgacgttatttatgagatgggtttttatgattagagtcccgcaattatacatttaatacgcgatagaaaacaaaatatagcgcgcaaactaggataaattatcgcgcgcggtgtcatctatgttactagatc

SEQ ID NO: 116 - DNA, 709 bp, Agrobacterium tumefaciens
tcctgctttaatgagatatgcgagacgcctatgatcgcatgatatttgctttcaattctgttgtgcacgttgtaaaaaacctgagcatgtgtagctcagatccttaccgccggtttcggttcattctaatgaatatatcacccgttactatcgtatttttatgaataatattctccgttcaatttactgattgtaccctactacttatatgtacaatattaaaatgaaaacaatatattgtgctgaataggtttatagcgacatctatgatagagcgccacaataacaaacaattgcgttttattattacaaatccaattttaaaaaaagcggcagaaccggtcaaacctaaaagactgattacataaatcttattcaaatttcaaaagtgccccaggggctagtatctacgacacaccgagcggcgaactaataacgctcactgaagggaactccggttccccgccggcgcgcatgggtgagattccttgaagttgagtattggccgtccgctctaccgaaagttacgggcaccattcaacccggtccagcacggcggccgggtaaccgacttgctgccccgagaattatgcagcatttttttggtgtatgtgggccccaaatgaagtgcaggtcaaaccttgacagtgacgacaaatcgttgggcgggtccagggcgaattttgcgacaacatgtcgaggctcagca

SEQ ID NO: 117 - protein, 643 aa, Artificial sequence
  Consensus sequence of Figure 1
  misc_feature (11)..(11): Xaa can be any naturally occurring amino acid
  misc_feature (16)..(16): Xaa can be any naturally occurring amino acid
  misc_feature (18)..(18): Xaa can be any naturally occurring amino acid
  misc_feature (21)..(22): Xaa can be any naturally occurring amino acid
  misc_feature (24)..(25): Xaa can be any naturally occurring amino acid
  misc_feature (27)..(29): Xaa can be any naturally occurring amino acid
  misc_feature (31)..(32): Xaa can be any naturally occurring amino acid
  misc_feature (34)..(34): Xaa can be any naturally occurring amino acid
  misc_feature (38)..(38): Xaa can be any naturally occurring amino acid
  misc_feature (42)..(46): Xaa can be any naturally occurring amino acid
  misc_feature (48)..(49): Xaa can be any naturally occurring amino acid
  misc_feature (51)..(67): Xaa can be any naturally occurring amino acid
  misc_feature (69)..(73): Xaa can be any naturally occurring amino acid
  misc_feature (84)..(84): Xaa can be any naturally occurring amino acid
  misc_feature (86)..(97): Xaa can be any naturally occurring amino acid
  misc_feature (101)..(101): Xaa can be any naturally occurring amino acid
  misc_feature (103)..(106): Xaa can be any naturally occurring amino acid
  misc_feature (115)..(121): Xaa can be any naturally occurring amino acid
  misc_feature (201)..(204): Xaa can be any naturally occurring amino acid
  misc_feature (215)..(216): Xaa can be any naturally occurring amino acid
  misc_feature (220)..(220): Xaa can be any naturally occurring amino acid
  misc_feature (222)..(223): Xaa can be any naturally occurring amino acid
  misc_feature (236)..(238): Xaa can be any naturally occurring amino acid
  misc_feature (240)..(240): Xaa can be any naturally occurring amino acid
  misc_feature (276)..(276): Xaa can be any naturally occurring amino acid
  misc_feature (297)..(307): Xaa can be any naturally occurring amino acid
  misc_feature (328)..(328): Xaa can be any naturally occurring amino acid
  misc_feature (360)..(361): Xaa can be any naturally occurring amino acid
  misc_feature (415)..(415): Xaa can be any naturally occurring amino acid
  misc_feature (476)..(476): Xaa can be any naturally occurring amino acid
  misc_feature (490)..(491): Xaa can be any naturally occurring amino acid
  misc_feature (493)..(498): Xaa can be any naturally occurring amino acid
  misc_feature (529)..(529): Xaa can be any naturally occurring amino acid
  misc_feature (559)..(571): Xaa can be any naturally occurring amino acid
  misc_feature (602)..(602): Xaa can be any naturally occurring amino acid
  misc_feature (608)..(608): Xaa can be any naturally occurring amino acid
  misc_feature (615)..(615): Xaa can be any naturally occurring amino acid
  misc_feature (626)..(626): Xaa can be any naturally occurring amino acid
  misc_feature (632)..(632): Xaa can be any naturally occurring amino acid
MAQVVATRSIXSSMLXPXSGXXSXXRXXXLXXPXSFAXKVLXXXXXRXXRXXXXXXXXXXXXXXXXXRXXXXXTEVIPVSPEDXPXXXXXXXXXXXXREEXLXXXXEMQQLGDTXXXXXXXSVGMWSKPTVRRKTKIVCTIGPSTNTREMIWKLAEAGMNVARLNMSHGDHASHQKVIDLVKEYNAQSKDNVIAIMLDTKXXXXGPEVRSGDLPXXQPIXLXXGQEFTFTIRRGVXXXTXDCVSVNYDDFVNDVEVGDMLLVDGGMMSLMVKSKTXDSVKCEVVDGGELKSRRHLNXXXXXXXXXXXVRGKSATLPSITEKDWEDIKXFGVDNKVDFYAVSFVKDAQVVHELKNYLKSCXXGADIHVIVKIESADSIPNLHSIITASDGAMVARGDLGAELPIEEVPLLQEEIIXLCRSMGKAVIVATNMLESMIVHPTPTRAEVSDIAIAVREGADAVMLSGETAHGKFPLKAVXVMHTVALRTEATIXXGXXXXXXMPPNLGQAFKNHMSEMFAYHATMMSNTLGTXSIVVFTRTGFMAILLSHYRPSGTIFAFTNXXXXXXXXXXXXXEKRIQQRLALYQGVCPIYMEFSDDAEETFAXALALLXKQGMVKXGEEVALVQSGXQPIWRXQSTHNIQVRKV

SEQ ID NO: 118 - protein, 578 aa, Artificial sequence
  Consensus sequence of Figure 2
  misc_feature (8)..(8): Xaa can be any naturally occurring amino acid
  misc_feature (10)..(10): Xaa can be any naturally occurring amino acid
  misc_feature (14)..(15): Xaa can be any naturally occurring amino acid
  misc_feature (17)..(21): Xaa can be any naturally occurring amino acid
  misc_feature (26)..(27): Xaa can be any naturally occurring amino acid
  misc_feature (29)..(29): Xaa can be any naturally occurring amino acid
  misc_feature (31)..(36): Xaa can be any naturally occurring amino acid
  misc_feature (41)..(42): Xaa can be any naturally occurring amino acid
  misc_feature (45)..(45): Xaa can be any naturally occurring amino acid
  misc_feature (47)..(47): Xaa can be any naturally occurring amino acid
  misc_feature (49)..(50): Xaa can be any naturally occurring amino acid
  misc_feature (52)..(54): Xaa can be any naturally occurring amino acid
  misc_feature (56)..(58): Xaa can be any naturally occurring amino acid
  misc_feature (62)..(62): Xaa can be any naturally occurring amino acid
  misc_feature (64)..(65): Xaa can be any naturally occurring amino acid
  misc_feature (69)..(69): Xaa can be any naturally occurring amino acid
  misc_feature (80)..(82): Xaa can be any naturally occurring amino acid
  misc_feature (84)..(84): Xaa can be any naturally occurring amino acid
  misc_feature (87)..(89): Xaa can be any naturally occurring amino acid
  misc_feature (92)..(92): Xaa can be any naturally occurring amino acid
  misc_feature (106)..(106): Xaa can be any naturally occurring amino acid
  misc_feature (168)..(168): Xaa can be any naturally occurring amino acid
  misc_feature (190)..(190): Xaa can be any naturally occurring amino acid
  misc_feature (193)..(193): Xaa can be any naturally occurring amino acid
  misc_feature (208)..(208): Xaa can be any naturally occurring amino acid
  misc_feature (224)..(224): Xaa can be any naturally occurring amino acid
  misc_feature (244)..(244): Xaa can be any naturally occurring amino acid
  misc_feature (290)..(290): Xaa can be any naturally occurring amino acid
  misc_feature (303)..(303): Xaa can be any naturally occurring amino acid
  misc_feature (320)..(320): Xaa can be any naturally occurring amino acid
  misc_feature (370)..(370): Xaa can be any naturally occurring amino acid
  misc_feature (430)..(430): Xaa can be any naturally occurring amino acid
  misc_feature (445)..(445): Xaa can be any naturally occurring amino acid
  misc_feature (447)..(447): Xaa can be any naturally occurring amino acid
  misc_feature (537)..(537): Xaa can be any naturally occurring amino acid
  misc_feature (540)..(540): Xaa can be any naturally occurring amino acid
  misc_feature (543)..(545): Xaa can be any naturally occurring amino acid
  misc_feature (567)..(567): Xaa can be any naturally occurring amino acid
AQVVATKXIXSSMXXPXXXXXSSRNXXLXLXXXXXXTLIGXXARXTXIXXRXXXLXXXVTSXKXXEDSXVIPVSPEDVPXXXEXLEXXXEMXRFGDTSVSMWSKPXVRRKTKIVCTIGPSTNTREMIWKLAEAGMNVARLNMSHGDHASHQKVIDLVKEYNAQSKDNXIAIMLDTKGPEVRSGDLPQPIXLEXGQEFTFTIKRGVSTXDCVSVNYDDFVNDVEXGDMLLVDGGMMSLMVKSKTXDSVKCEVVDGGELKSRRHLNVRGKSATLPSITDKDWEDIKFGVDNXVDFYAVSFVKDAXVVHELKNYLKSCGADIXVIVKIESADSIPNLHSIITASDGAMVARGDLGAELPIEEVPLLQEEIIRXCRSMGKAVIVATNMLESMIVHPTPTRAEVSDIAIAVREGADAVMLSGETAHGKFPLKAVXVMHTVALRTEASLTXGXTPANLGQAFKNHMSEMFAFHATIMSNTLGTSLVVFTRTGFMAVLLSHYRPSGTIFAFTNQKRIQQRLALYQGVCPIYMEFSDDAEETFAXALXLLXXXGMVKEGEEVALVQSGSQPIWRXQSTHNIQVRKV

SEQ ID NO: 119 - protein, 482 aa, Artificial sequence
  Consensus sequence of Figure 3
  misc_feature (48)..(48): Xaa can be any naturally occurring amino acid
  misc_feature (85)..(85): Xaa can be any naturally occurring amino acid
  misc_feature (201)..(201): Xaa can be any naturally occurring amino acid
  misc_feature (232)..(232): Xaa can be any naturally occurring amino acid
  misc_feature (234)..(234): Xaa can be any naturally occurring amino acid
  misc_feature (280)..(280): Xaa can be any naturally occurring amino acid
  misc_feature (357)..(357): Xaa can be any naturally occurring amino acid
  misc_feature (361)..(361): Xaa can be any naturally occurring amino acid
  misc_feature (381)..(381): Xaa can be any naturally occurring amino acid
  misc_feature (385)..(385): Xaa can be any naturally occurring amino acid
  misc_feature (432)..(432): Xaa can be any naturally occurring amino acid
  misc_feature (436)..(436): Xaa can be any naturally occurring amino acid
  misc_feature (438)..(438): Xaa can be any naturally occurring amino acid
  misc_feature (441)..(441): Xaa can be any naturally occurring amino acid
  misc_feature (468)..(468): Xaa can be any naturally occurring amino acid
  misc_feature (476)..(476): Xaa can be any naturally occurring amino acid
  misc_feature (480)..(480): Xaa can be any naturally occurring amino acid
MSRRLRRTKIVTTLGPATDRDNNLEKIIAAGANVVRMNFSHGSPEDHXMRADKVREIAAKLGRHVAILGDLQGPKIRVSTFKEGXKVFLNIGDKFLLDANLGKGEGDKEKVGIDYKGLPADVVPGDILLLDDGRVQLKVLEVQGMKVFTEVTVGGPLSNNKGINKLGGGLSAEALTEKDKADIITAAKIGVDYLAVSFPRXGEDLNYARRLARDAGCDAKIVAKVERAEAVXSXEAMDDIILASDVVMVARGDLGVEIGDPELVGIQKKLIRRARQLNRXVITATQMMESMITNPMPTRAEVMDVANAVLDGTDAVMLSAETAAGQYPSETVAAMARVCLGAEKIPSINVSKHRLDXQFDXVEEAIAMSAMYAANHLKGVXAIIXMTESGRTALMMSRISSGLPIFAMSRHERTLNLTALYRGVTPVHFDSXTDGXVXAAXEAVNLLRDKGYLMSGDLVIVTQGDVMXTVGSTNTXRILXVE

SEQ ID NO: 120 - DNA, 2571 bp, Arabidopsis thaliana
atggtgtcaagatcttgtgctaattttctagacttatcatcttgggaccttttagattttcctcaaactccacgaactcttccacgcgtcatgactgttccgggaatcatcaccgacgtagacggtgatacaacctccgaagtaacttctacctccggtggttcacgtgagaggaagatcattgtagctaacatgttaccactccaatctaaaagagatgcagaaactggtaaatggtgttttaactgggacgaagactctctccagttacaacttagagatgggttctcttcagaaacagagtttctctacgttggatcacttaacgtagacatcgaaactaacgaacaagaagaagtttcacagaagcttttagaggaatttaactgcgttgcaacgtttttgtctcaagagttgcaagaaatgttctatcttggtttctgtaaacatcagttatggccactctttcattacatgcttccaatgtttcctgatcatggtgatcgttttgatcgacgtctatggcaagcttatgtatcagccaacaagatattttcagatagagttatggaagttatcaaccctgaggatgattacgtttggattcaagattatcatcttatggttcttcctactttcttgaggaaacgttttaataggatcaaactcggtttcttccttcatagtccgtttccttcttcagagatttaccgcacattgcctgttcgtgacgagattttgagaggtttgttgaattgtgatctcattggtttccatacgtttgattacgcgaggcatttcttgtcttgttgtagtagaatgcttggtcttgattacgagtctaagcgcggtcacataggtcttgattactttggtaggactgtgtatatcaaaatacttcctgttggtgttcatatgggtagattggagtctgttttgagtcttgattctactgcggcgaagacgaaagagattcaagaacagtttaaagggaagaagcttgttcttggtatcgatgatatggatatatttaaagggataagcttaaagcttatagcaatggaacatctctttgagacttattggcatttgaaagggaaagttgttcttgttcagatagtgaaccctgcaagatcttctggtaaagatgttgaagaagcgaagagggagacgtatgagactgcgaggaggatcaatgagcgttacggtacttctgactataagccgatagttttgatcgatcgtcttgttccacgttctgagaaaaccgcgtattatgctgcagcagattgttgcttagtgaatgcagtgagagatggtatgaacttagttccttataagtatatcgtctgcaggcaggggactcgaagtaataaggccgttgtggattcatcgcctcgcacaagcactcttgtcgtgtctgagtttattggatgctcaccttctttgagtggtgccattagggtgaatccatgggatgtggatgctgttgctgaagcggtaaactcggctcttaaaatgagtgagactgagaagcaactacggcatgagaaacattatcattatattagcactcatgatgttggttattgggcaaagagctttatgcaggatcttgagagagcgtgccgagatcattatagtaaacgttgttgggggattggttttggtttggggttcagagttttgtcactctctccaagttttaggaagctatctgtggaacacattgttccagtttatagaaaaacacagagaagagctatatttcttgattatgatggtactcttgttcctgaaagctccattgttcaagatccaagcaacgaggttgtctctgttctgaaagctctctgtgaagatccgaataacacggtgtttattgttagtggaagaggtagagagtctctgagcaattggctatctccttgtgaaaatcttggaatagcagctgaacatggatacttcattagatggaagagcaaagatgagtgggagacttgttattcgcctacggatacagagtggaggtcaatggtggaaccggttatgagatcgtatatggaggcaacagatgggacgagtatagagtttaaagaaagtgctttggtgtggcaccatcaagacgcagatcctgactttggatcatgtcaagctaaggagatgcttgatcatctagagagtgttctcgccaatgagcctgtggttgtcaagagaggtcaacacatcgttgaagtcaaaccacaaggtgtaagcaaaggtctagctgcggagaaagtaatccgagaaatggtagaacgcggggagccaccggaaatggtgatgtgcataggagacgatagatcagacgaagacatgtttgagagcatattaagcacagtgacaaatccggaacttcttgtgcagccagaggtttttgcatgcacggttggaagaaaaccaagcaaagctaaatacttcttggacgatgaagccgacgtgcttaagctcctaagaggtcttggagactcatcatcgagcttaaaacctagttcttctcacacacaagttgcatttgaaagcatcgtttaa

SEQ ID NO: 121 - protein, 856 aa, Arabidopsis thaliana
MVSRSCANFLDLSSWDLLDFPQTPRTLPRVMTVPGIITDVDGDTTSEVTSTSGGSRERKIIVANMLPLQSKRDAETGKWCFNWDEDSLQLQLRDGFSSETEFLYVGSLNVDIETNEQEEVSQKLLEEFNCVATFLSQELQEMFYLGFCKHQLWPLFHYMLPMFPDHGDRFDRRLWQAYVSANKIFSDRVMEVINPEDDYVWIQDYHLMVLPTFLRKRFNRIKLGFFLHSPFPSSEIYRTLPVRDEILRGLLNCDLIGFHTFDYARHFLSCCSRMLGLDYESKRGHIGLDYFGRTVYIKILPVGVHMGRLESVLSLDSTAAKTKEIQEQFKGKKLVLGIDDMDIFKGISLKLIAMEHLFETYWHLKGKVVLVQIVNPARSSGKDVEEAKRETYETARRINERYGTSDYKPIVLIDRLVPRSEKTAYYAAADCCLVNAVRDGMNLVPYKYIVCRQGTRSNKAVVDSSPRTSTLVVSEFIGCSPSLSGAIRVNPWDVDAVAEAVNSALKMSETEKQLRHEKHYHYISTHDVGYWAKSFMQDLERACRDHYSKRCWGIGFGLGFRVLSLSPSFRKLSVEHIVPVYRKTQRRAIFLDYDGTLVPESSIVQDPSNEVVSVLKALCEDPNNTVFIVSGRGRESLSNWLSPCENLGIAAEHGYFIRWKSKDEWETCYSPTDTEWRSMVEPVMRSYMEATDGTSIEFKESALVWHHQDADPDFGSCQAKEMLDHLESVLANEPVVVKRGQHIVEVKPQGVSKGLAAEKVIREMVERGEPPEMVMCIGDDRSDEDMFESILSTVTNPELLVQPEVFACTVGRKPSKAKYFLDDEADVLKLLRGLGDSSSSLKPSSSHTQVAFESIV

SEQ ID NO: 122 - DNA, 2571 bp, Artificial sequence
  codon optimized AtTPS8 for expression in Zea mays
atggtcagccgatcctgtgccaacttcctcgatctctcgagttgggatctgcttgatttccctcaaacaccgaggactctcccacgcgttatgaccgtacccggtatcattacggacgttgatggcgatactacaagcgaggtcacgtcaacctcaggaggttcacgtgagcggaagattatagtcgccaatatgcttccacttcaatccaaacgcgacgcggaaaccgggaagtggtgcttcaattgggatgaggattcactccagttgcaacttcgcgacggtttctcttcggagacggagttcctttacgtcggatctctgaacgttgatatcgaaacaaacgagcaagaggaagtcagccaaaagctgctcgaagagttcaactgcgtggctacattcctctcccaagaactccaagagatgttctaccttggtttctgcaaacaccaactgtggccactcttccactacatgttaccgatgtttcccgaccatggcgataggttcgaccgacgcctctggcaagcgtacgtgagtgcaaacaagatcttctccgatagggtgatggaggtgataaacccagaggacgattacgtctggattcaagactaccaccttatggtactccctacgttccttaggaagaggttcaaccgtatcaagcttggtttctttcttcactcaccctttccctctagcgaaatctataggacccttccggtcagagacgagatccttagagggctgctcaactgtgacctaatcggatttcataccttcgactacgctcgccatttcctatcgtgctgttcgagaatgctcggtctggattacgagtctaagcgtgggcacatcggacttgactactttggacggacggtctacatcaagattcttccagtgggtgttcacatgggacgcctcgaatctgttctttcgctcgactccaccgcagccaagaccaaggagattcaagaacagttcaaggggaagaaactggtccttgggattgatgacatggatatcttcaagggaatatcccttaagttgatcgcaatggagcacctgtttgaaacctattggcacctcaaaggcaaggtggtactcgtccaaatcgtgaaccctgctcgaagttccggaaaagacgttgaggaagcgaaacgcgagacctatgaaacagcacgacggatcaatgagcgctacggcacttcggactataaacccatcgtgctgattgatcgcttggtccctagatccgaaaagaccgcttactatgctgccgctgattgctgcctcgtcaatgcggtgcgtgacggtatgaacctagtcccttataagtacatcgtctgtcgtcaaggaacacgcagcaacaaggcagtagtcgattcgtcccctcggacgagcactctggtggtttctgaattcatcggctgctcaccctcgctgtccggagcgattcgcgtcaatccttgggatgtggatgctgttgcggaagccgttaacagcgctttgaagatgagtgagacggagaaacagctaagacatgagaaacactaccactacatttctacacacgacgtagggtattgggctaagtcgttcatgcaagacctggagagggcctgtagggatcactacagtaaacggtgctggggtataggattcggacttggcttccgcgtactttccctatccccttcctttcgcaaactcagcgtggaacatatcgttccggtctaccggaagacgcaacggagagcgatcttcttggactatgatggcaccctggttcccgaatcaagtatagttcaagacccgagtaatgaggtggtttcggttctgaaggctctctgcgaagaccccaataacaccgtcttcatagttagcggacgtgggagggagtccttaagtaactggctgagtccctgcgagaaccttgggattgctgcggagcacggttacttcattaggtggaagtcgaaagatgaatgggagacgtgctactcccctaccgacaccgagtggcgtagtatggttgaaccagttatgaggagctatatggaagcgactgacggcacctccattgagttcaaggagtctgcgttggtctggcaccaccaagatgccgaccctgactttggaagctgccaagcaaaggagatgttagaccatttggaaagcgtccttgcaaatgagccagtcgtggtcaagaggggtcagcatatcgtggaagtgaaaccccaaggcgtctcgaagggactagctgcggagaaagtgatacgagaaatggtcgaacgtggggaacctccggagatggtaatgtgtatcggagatgaccgttccgacgaggatatgttcgagagtatccttagcactgtgacgaatccggagctgctcgtacagcctgaggtgtttgcctgcactgtgggtcggaagccaagtaaggctaagtacttcctggacgatgaagctgatgtgttgaaacttctcagagggcttggcgactcaagctcgagcttgaagccttcttcctcacacacccaagtagcgtttgaatctatcgtctga

SEQ ID NO: 123 - DNA, 2604 bp, Arabidopsis thaliana
atggtgtcaagatcttgtgcaaattttctagatttagcatcttgggacttattggactttcctcaaactcaaagagctcttcctcgtgtcatgactgttcctggtatcatctctgagttggatggaggctacagtgatggatcctctgatgttaattcctcaaacagctcccgtgagcggaagattatagtggctaatatgttaccattacaagctaagagagatacagaaactggacaatggtgttttagttgggatgaagattctcttctcttgcaactcagagatgggttttcttcggatacagagtttgtttatataggatcacttaatgctgatattggtattagtgaacaagaagaagtttctcataagcttttgttggatttcaattgtgttcctacgtttttacccaaggagatgcaagagaagttctatcttggtttctgtaaacatcatttgtggccgctatttcactatatgcttcctatgttccctgaccatggtgatcgttttgaccggcgtctttggcaagcgtatgtctctgcaaacaagatattttcagatagggtgatggaagttatcaaccctgaggaagattatgtttggattcatgattatcatctgatggttcttcccacattcttgaggaaacggtttaacaggatcaagcttggatttttccttcacagtccatttccatcatcagaaatttaccgtactttgccagtccgggatgatcttttgagaggattgttgaactgtgatctcattggcttccacacatttgattatgcacgccattttttgtcatgctgcagtagaatgcttgggcttgattatgaatctaagcgtgggcacatcgggcttgattactttggtcgaacggtgtttattaagatccttcctgttggcatccatatggggaggctggaatcggttttgaatcttccgtcgactgcagcgaaaatgaaagagatacaagaacagtttaaggggaaaaagttgattcttggtgttgacgacatggacatctttaaaggcataagcctcaaacttatagccatggaacgtctctttgagacatattggcatatgcgaggaaaacttgtcctgattcagatagtgaacccagcacgggccacgggtaaggatgtggaagaagcaaagaaggagacatattcaactgcaaaaaggatcaatgagcgctatggttctgctggttatcagccagtgatcttgattgatcgtcttgttcctcgttacgagaagactgcttattatgctatggcagactgctgcctggtgaatgcagtaagagacggcatgaacttagttccatataaatatatcatttgcaggcaagggaccccaggaatggataaggccatggggattagccatgactcagcccggacgagcatgcttgttgtctctgagtttatcggctgctcgccttctttgagtggtgcgatcagggtgaacccatgggatgtagatgctgttgcagaagcggtaaacttagccctcactatgggtgagactgaaaagcgattaaggcacgagaaacactatcactatgtgagtactcatgatgtgggttactgggcaaagagctttatgcaggatcttgagagggcatgccgggagcattataataaacgttgttggggtattggttttggcttgagtttcagagttctgtcactgtctccgagttttaggaagctatctatcgatcacattgtctccacgtatagaaatacacagagaagggcaatatttttggactatgatggcactctcgttcctgaaagctccatcatcaaaacccctaatgccgaagtcctgtctgttctgaaatctctgtgtggagatcctaaaaacactgtgtttgttgtcagtggaagaggatgggagtctctgagcgactggctatctccatgtgaaaatcttggaatcgcagctgaacacggatacttcataaggtggagtagcaagaaagaatgggagacttgttattcgtcggctgaggcggaatggaagacgatggtagaaccggtaatgagatcatacatggacgcaaccgatggttctactatagagtacaaagagagtgctttggtttggcatcatcaagacgcagatccagactttggagcctgtcaagcaaaagagcttctagatcatctagagagtgtactcgcaaatgagcctgtagtcgtcaagagaggccaacacattgtagaggtcaaaccacagggagtaagcaaaggtctagcagtggaaaaggtgatacaccaaatggtagaggatggaaacccaccggacatggtgatgtgtataggagatgacagatcagacgaagacatgtttgagagcatattgagcacagtgacaaacccggacctcccaatgccacctgagatctttgcctgcacggtgggaagaaaaccaagcaaagccaaatacttcttagacgatgtctctgatgtattaaagctcctaggaggattagctgctgcaacgagcagctcgaagccagagtatcaacaacaatcctcctcattgcacacgcaagtggcgtttgagagcatcatatga

SEQ ID NO: 124 - protein, 867 aa, Arabidopsis thaliana
MVSRSCANFLDLASWDLLDFPQTQRALPRVMTVPGIISELDGGYSDGSSDVNSSNSSRERKIIVANMLPLQAKRDTETGQWCFSWDEDSLLLQLRDGFSSDTEFVYIGSLNADIGISEQEEVSHKLLLDFNCVPTFLPKEMQEKFYLGFCKHHLWPLFHYMLPMFPDHGDRFDRRLWQAYVSANKIFSDRVMEVINPEEDYVWIHDYHLMVLPTFLRKRFNRIKLGFFLHSPFPSSEIYRTLPVRDDLLRGLLNCDLIGFHTFDYARHFLSCCSRMLGLDYESKRGHIGLDYFGRTVFIKILPVGIHMGRLESVLNLPSTAAKMKEIQEQFKGKKLILGVDDMDIFKGISLKLIAMERLFETYWHMRGKLVLIQIVNPARATGKDVEEAKKETYSTAKRINERYGSAGYQPVILIDRLVPRYEKTAYYAMADCCLVNAVRDGMNLVPYKYIICRQGTPGMDKAMGISHDSARTSMLVVSEFIGCSPSLSGAIRVNPWDVDAVAEAVNLALTMGETEKRLRHEKHYHYVSTHDVGYWAKSFMQDLERACREHYNKRCWGIGFGLSFRVLSLSPSFRKLSIDHIVSTYRNTQRRAIFLDYDGTLVPESSIIKTPNAEVLSVLKSLCGDPKNTVFVVSGRGWESLSDWLSPCENLGIAAEHGYFIRWSSKKEWETCYSSAEAEWKTMVEPVMRSYMDATDGSTIEYKESALVWHHQDADPDFGACQAKELLDHLESVLANEPVVVKRGQHIVEVKPQGVSKGLAVEKVIHQMVEDGNPPDMVMCIGDDRSDEDMFESILSTVTNPDLPMPPEIFACTVGRKPSKAKYFLDDVSDVLKLLGGLAAATSSSKPEYQQQSSSLHTQVAFESII

SEQ ID NO: 125 - DNA, 2604 bp, Artificial sequence
  codon optimized AtTPS9 for expression in Zea mays
atggtaagccgtagctgtgccaactttttggatctagccagctgggatcttctcgatttcccccaaactcagcgtgctctccctcgcgttatgacggttcccggcatcatttcagaactggacggcggttacagtgacgggtcttcagatgtcaattcatctaactcttcacgggagcggaagattatagttgctaacatgctgcctctccaagctaagcgcgataccgagacgggccagtggtgcttctcctgggatgaggatagccttctgctgcaactgcgggacggcttttcctcggataccgagttcgtctatatcggctccctaaacgctgatattgggatctccgagcaagaggaagtgtcgcacaagctcttgcttgacttcaactgcgtcccaactttcctacccaaggagatgcaagagaagttctacttgggcttctgcaaacaccatctctggccactcttccactacatgctcccaatgttcccggaccacggagacagattcgacagacgcctttggcaagcgtacgtgtcagcaaacaagatctttagcgaccgcgtaatggaggtgattaacccggaagaggactacgtgtggattcacgactaccacttgatggtgcttccgacatttctgaggaagcgctttaatcggatcaagttggggtttttccttcactcgcccttccccagctccgaaatctataggacactccccgtccgtgatgacctgcttcgtggcctgttgaattgcgatctcatcggctttcacacattcgactacgctaggcacttcctgtcctgttgctcgagaatgctgggcctagactacgagtctaaacgggggcatatcgggctcgactacttcgggagaacggtctttatcaagatacttccggtgggaattcacatgggacgcctcgagtcagttctaaacttgcccagcacagccgctaagatgaaagaaatccaagagcagttcaaaggcaaaaagcttatcctcggggtcgacgatatggatatcttcaaggggatttccctcaagctgatcgcgatggaaaggttattcgagacttactggcatatgaggggaaagctcgttctgatccaaatagttaacccggcaagggccaccggaaaggacgtcgaggaagcaaagaaagaaacctacagcaccgcaaagaggatcaacgaacgttacggctctgctggctaccaacccgttattctgatagatcgtttggtcccacgatacgagaagactgcgtactatgcgatggcggactgttgcttagtcaacgcggtgcgagacggcatgaatctggtgccctacaagtatatcatatgccgacaaggcacgccagggatggacaaggcgatgggtatatctcacgatagcgcacggacctctatgctggtggtcagtgagttcatcggttgctccccgtctttgagcggggctatacgggtgaacccttgggacgttgacgccgtagctgaagctgtcaacttggcgttaacaatgggcgagaccgagaaacgccttaggcacgagaagcattaccactacgtctccacgcatgacgttggttactgggctaagagctttatgcaagacctcgaacgggcatgccgcgagcactacaataagcggtgttggggcatagggttcggtttgagctttcgtgtgcttagtctaagcccaagcttccgaaagctctccatagatcacatcgtcagcacctacagaaacacgcagcgtagggccatattcttggactacgacggcactctcgttccggagagtagcatcataaagacgcctaatgccgaggtactctccgtgctgaagagtctctgcggagacccgaagaataccgtcttcgtcgtatcgggaagaggttgggaatctctctctgactggctatcaccgtgcgaaaatctggggatcgcagctgagcacggttacttcattaggtggtcgagtaagaaagaatgggagacctgctattcgtctgctgaagccgagtggaagacaatggttgagccagttatgagaagctatatggatgcgacggacggctcgactatcgagtacaaggagtcagcgttagtgtggcatcaccaagacgctgacccagacttcggagcgtgtcaagctaaggagttgctcgaccatctcgaatccgttctagcgaacgagcctgtggtcgttaagcgtggtcagcatatcgttgaagtcaagccacaaggggtctccaagggtctcgccgtggagaaggtgatccaccaaatggtggaggacggcaaccctccggatatggtgatgtgtatcggggatgaccgctctgacgaggatatgttcgaatcaatccttagtacggtaacaaacccggatcttcctatgccacctgaaatcttcgcctgcaccgtgggacgcaaaccgagtaaagcgaagtattttctggatgacgtctcagatgtgctcaagcttctcggcggtctagctgcggccacttcgtccagtaaacctgagtaccagcaacagtcgtctagcctccacactcaagtcgccttcgagtctataatctga

SEQ ID NO: 126 - protein, 12 aa, Artificial sequence
  TPS homolog protein motif
  misc_feature (2)..(2): Xaa is Ile or Phe
  misc_feature (4)..(4): Xaa is Leu or Met
  misc_feature (6)..(6): Xaa is Ser, Ile or Ala
  misc_feature (11)..(11): Xaa is Ser or Tyr
GXFXHXPFPSXE

SEQ ID NO: 127 - protein, 8 aa, Artificial sequence
  TPS homolog protein motif
  misc_feature (1)..(1): Xaa is Asp or Asn
  misc_feature (2)..(2): Xaa is Leu or Phe
  misc_feature (3)..(3): Xaa is Val or Ile
  misc_feature (4)..(4): Xaa is Gly or Ser
  misc_feature (5)..(5): Xaa is Phe or Thr
  misc_feature (6)..(6): Xaa is His or Gln
  misc_feature (7)..(7): Xaa is Thr or Ser
  misc_feature (8)..(8): Xaa is Phe, Tyr or Glu
XXXXXXXX

SEQ ID NO: 128 - protein, 15 aa, Artificial Sequence
  TPS homolog protein motif
  misc_feature (1)..(1): Xaa is Asp or Ala
  misc_feature (2)..(2): Xaa is Tyr or His
  misc_feature (3)..(3): Xaa is Ala, Val or Lys
  misc_feature (7)..(7): Xaa is Leu or Met
  misc_feature (9)..(9): Xaa is Cys, Ser or Ala
  misc_feature (10)..(10): Xaa is Cys or Val
  misc_feature (11)..(11): Xaa is Ser, Asn or Gly
  misc_feature (13)..(13): Xaa is Met, Leu, Ile or Val
  misc_feature (14)..(14): Xaa is Leu or Val
XXXRHFXSXXXRXXG

SEQ ID NO: 129 - protein, 7 aa, Artificial Sequence
  TPS homolog protein motif
  misc_feature (1)..(1): Xaa is Ile, Ala or Val
  misc_feature (2)..(2): Xaa is Lys, Asp or Val
  misc_feature (3)..(3): Xaa is Ile or Ala
  misc_feature (4)..(4): Xaa is Leu, Ile, or Met
  misc_feature (5)..(5): Xaa is Pro or Ser
  misc_feature (6)..(6): Xaa is Val, Met or Ile
XXXXXXG

SEQ ID NO: 130 - protein, 20 aa, Artificial Sequence
  TPS homolog protein motif
  misc_feature (1)..(1): Xaa is Val or Leu
  misc_feature (4)..(4): Xaa is Phe or Thr
  misc_feature (5)..(5): Xaa is Ile, Ala, Thr or Val
  misc_feature (7)..(7): Xaa is Cys or Ser
  misc_feature (8)..(8): Xaa is Ser or Ala
  misc_feature (9)..(9): Xaa is Phe, Lys or Gly
  misc_feature (10)..(10): Xaa is Ser, Glu or Asn
  misc_feature (12)..(12): Xaa is Ser or Pro
  misc_feature (13)..(13): Xaa is Asp or Gly
  misc_feature (15)..(15): Xaa is Ile or Val
  misc_feature (16)..(16): Xaa is Arg or Leu
  misc_feature (17)..(17): Xaa is Val or Ile
  misc_feature (20)..(20): Xaa is Trp or Asn
XSEXXGXXXXLXXAXXXNPX

SEQ ID NO: 131 - protein, 6 aa, Artificial Sequence
  TPS homolog protein motif
  misc_feature (1)..(1): Xaa is Leu or Phe
XDYDGT

SEQ ID NO: 132 - protein, 6 aa, Artificial Sequence
  TPS homolog protein motif
  misc_feature (5)..(5): Xaa is Tyr, Val or Cys
  misc_feature (6)..(6): Xaa is Phe or Trp
AEHGXX

SEQ ID NO: 133 - protein, 9 aa, Artificial Sequence
  TPS homolog protein motif
  misc_feature (1)..(1): Xaa is Asp, Asn, Ala or Glu
  misc_feature (2)..(2): Xaa is His or Leu
  misc_feature (4)..(4): Xaa is Glu, Lys or Gln
  misc_feature (5)..(5): Xaa is Ser, Tyr, Gln or Asn
  misc_feature (6)..(6): Xaa is Ala or no amino acid
  misc_feature (7)..(7): Xaa is Val or Leu
  misc_feature (8)..(8): Xaa is Leu, Ser or Val
  misc_feature (9)..(9): Xaa is Ala, Thr or Pro
XXLXXXXXX

SEQ ID NO: 134 - protein, 11 aa, Artificial Sequence
  TPS homolog protein motif
  misc_feature (1)..(1): Xaa is Val, Ile or Leu
  misc_feature (3)..(3): Xaa is Val or Ile
  misc_feature (4)..(4): Xaa is Lys, Arg or Asn
  misc_feature (5)..(5): Xaa is Pro or Asn
  misc_feature (6)..(6): Xaa is Gln, Ala or Lys
  misc_feature (7)..(7): Xaa is Gly, Arg or Ser
  misc_feature (8)..(8): Xaa is Val or Ile
  misc_feature (9)..(9): Xaa is Ser, Asn, Gly or Thr
XEXXXXXXXKG

SEQ ID NO: 135 - protein, 10 aa, Artificial sequence
  TPS homolog protein motif
  misc_feature (4)..(4): Xaa is Arg, Trp or Gln
  misc_feature (5)..(5): Xaa is Ser or Thr
  misc_feature (8)..(8): Xaa is Asp or Glu
  misc_feature (9)..(9): Xaa is Met or Thr
GDDXXDEXXF

SEQ ID NO: 136 - protein, 6 aa, Artificial sequence
  TPS homolog protein motif
  misc_feature (1)..(1): Xaa is Phe or Tyr
  misc_feature (2)..(2): Xaa is Ala, Thr or Pro
  misc_feature (3)..(3): Xaa is Cys or Val
  misc_feature (4)..(4): Xaa is Thr, Lys or Met
  misc_feature (5)..(5): Xaa is Val or Ile
XXXXXG

SEQ ID NO: 137 - protein, 11 aa, Artificial sequence
  TPS homolog protein motif
  misc_feature (1)..(1): Xaa is Lys or Ser
  misc_feature (2)..(2): Xaa is Pro, Ser or Lys
  misc_feature (3)..(3): Xaa is Ser or Thr
  misc_feature (4)..(4): Xaa is Lys, Ala, Thr or Leu
  misc_feature (6)..(6): Xaa is Lys or Ser
  misc_feature (7)..(7): Xaa is Tyr or Trp
  misc_feature (8)..(8): Xaa is Tyr, Arg, His or Phe
  misc_feature (9)..(9): Xaa is Leu or Val
  misc_feature (10)..(10): Xaa is Asp, Glu or Leu
  misc_feature (11)..(11): Xaa is Asp, Asn or Glu
XXXXAXXXXXX

SEQ ID NO: 138 - DNA, 99 bp, Citrullus lanatus
atgggatccatgaaagcatccattcttagatcagtccgctcagctgtctcacgctctagctcttctaatagactcctgtcccgtagttttgcaacacat

SEQ ID NO: 139 - protein, 33 aa, Citrullus lanatus
MGSMKASILRSVRSAVSRSSSSNRLLSRSFATH

SEQ ID NO: 140 - DNA, 1198 bp, Zea mays
tcccgtgtccgtcaatgtgatactactagcatagtactagtaccatgcatacacacagcaggtcggccgcctggatggatcgatgatgatactacatcatcctgtcatccatccaggcgatctagaaggggcgtggctagctagcaaactgtgaccggtttttctacgccgataataatactttgtcatggtacagacgtacagtactggttatatatatctgtagatttcaactgaaaagctaggatagctagattaattcctgagaaacacagataaaattcgagcttggctatagatgacaaaacggaagacgcatgcattggacgacgtatgcaatgcgagcgcgtctcgtgtcgtcccgtccaagtctggcgatctcacgccacgtgctcaacagctcaaggactgttcgtcaccagcgttaaattcattgaagggatgacgcatttcggcatttgtcattgcttgtagctatatatatatatccaacagatttctctcaagcttttgtatgcgtgaatgtaaagtctagcttatacgacagcacgtgcagatatattaacgtcattattaggtggagagcaagatgcatgatctggtagaaattgtcgaaaacacaagagagagtgaagtgcacacttctggtataggagtgtatacgccgctggttggtgggcaatgcgcgccgcaatattggccaatgaaacctagcaacgcccactcgccacgccccatgaatggcccccgcacggcagcgagccagccagtgcccgcgcgcggcccagccggagtcggcggaacgcgccacgggggacgaggcgcccgagggccgaggcagcgcggcatggcaagcaagccgaagcgggcaagcgacctgcatgcagcccctgcccctcgccctcgtcagtcgtcccagcctcccactggaatccacccaacccgcccttcctctccaaagcacgcgccccgcgactcgcctccgcctacgtgtcggcagcgtccccgccggtcgcccacgtaccccgccccgttctcccacgtgcccctccctctgcgcgcgtccgattggctgacccgcccttcttaagccgcgccagcctcctgtccgggccccaacgccgtgctccgtcgtcgtctccgcccccagagtgatcgagcccactgacctggcccccgagcctcagctcgtgagtcc

SEQ ID NO: 141 - DNA, 1219 bp, Zea mays
ttggttttttgataatttgtttatctcacatgatggttctaacaatatgcgcagatcttatacatctctctcgtagtttttcataaactacgagaaagatataggttttatgaacaaatttacttttattttgtcatataatgaaatggtcaaaatataaattgtacatcatgatgagttatacaaatttgtagtccaaaatcttttcatttaaattaatttactgctttaaaatgtgatttttaattgtctttgcctagtgttgaaaaaaagcactcggcaaagaaactctttgccgagtgttaaaaaaacactcggcaaagaatctctttgccgagtgtcaaaaataaaatatttggcaaatagcttctttgctgagtgtttttttgcttagcacttggtaaagaacttctttgccgagtgtccgaaaaagcactcgataaaatatttggcactcagcaaagaaccgaattccagtagcgtgagtcagaagttggcatttgaaccctttgaaataatcaaacaaatcaacgcagttgcatatgaattggctttgccacatggtagtgcagtccatcgagtgttccatgtttcacagcttaaactaacccatggttttggtaacagaacacacaccagtgactccatcgttaccggattttgatactacactgaaggttccggaacaaatactggattctagattgattctagattgcttcgatcaaatggggatcatcaacctaacacagcttaaattatacatgcatgcgtacatttggtccttcaagaggaggcaggtgatgatcaaggtctctctagcggcctggtgtgcagccacgtacccatccacgcgtcgccgcgggcgacgacaggtgttggccaacctggacatcagacaagcacgacaatgacaggcgttcgccaagcgtacgtacaggagacgaacacgacaagtagcaccgtcctggccgagagcccgtcatgctcatgcatgcatgcatgctgatcatgcatactcgataaatatacagcagagagctgagctacgtacacaaacaagaagcttgcattgttcgttgctcgatcgttgcaggtaatggagaaccctgctccgagtatcgtagtgccccccatcgccgcacctgtatcagcgaacttcagcagactcgccttccgcaacctgtacatccgacggacgggtccagacagcagggag

SEQ ID NO: 142 - DNA, 1099 bp, Zea mays
ttggttttttgataatttgtttatctcacatgatggttctaacaatatgcgcagatcttatacatctctctcgtagtttttcataaactacgagaaagatataggttttatgaacaaatttacttttattttgtcatataatgaaatggtcaaaatataaattgtacatcatgatgagttatacaaatttgtagtccaaaatcttttcatttaaattaatttactgctttaaaatgtgatttttaattgtctttgcctagtgttgaaaaaaagcactcggcaaagaaactctttgccgagtgttaaaaaaacactcggcaaagaatctctttgccgagtgtcaaaaataaaatatttggcaaatagcttctttgctgagtgtttttttgcttagcacttggtaaagaacttctttgccgagtgtccgaaaaagcactcgataaaatatttggcactcagcaaagaaccgaattccagtagcgtgagtcagaagttggcatttgaaccctttgaaataatcaaacaaatcaacgcagttgcatatgaattggctttgccacatggtagtgcagtccatcgagtgttccatgtttcacagcttaaactaacccatggttttggtaacagaacacacaccagtgactccatcgttaccggattttgatactacactgaaggttccggaacaaatactggattctagattgattctagattgcttcgatcaaatggggatcatcaacctaacacagcttaaattatacatgcatgcgtacatttggtccttcaagaggaggcaggtgatgatcaaggtctctctagcggcctggtgtgcagccacgtacccatccacgcgtcgccgcgggcgacgacaggtgttggccaacctggacatcagacaagcacgacaatgacaggcgttcgccaagcgtacgtacaggagacgaacacgacaagtagcaccgtcctggccgagagcccgtcatgctcatgcatgcatgcatgctgatcatgcatactcgataaatatacagcagagagctgagctacgtacacaaacaagaagcttgcattgttcgttgctcgatcgttgcaggta

SEQ ID NO: 143 - DNA, 1008 bp, Zea mays
taactcatatccggttagataccaactacacatattgaatagcataaatctaataaatatatggcgcaatgaaaatagtaaataattaaatatgagtaaataatatgatgacaataatgaataatattggaacatgtacattgaccctattttgctaatatatacttattatatttgcttaatttggtaggatgtatatgtgattgaggcgggtataaattatccataggtatgtgggtataaatagtctatacttatacccatactcatatacccgacgggtatatgattgtgtccattgccatatctgcgggtaaaaaactcattatatacttgtccttataagtaaaacctgttggacactagagtttaggtaccatataattattaattttgaacgaaggaagtaatttgcagcgtattaaggtgcttctggtctagaagaaatgtcacaatgtttggtgttagtttttggtgaaatttaaggttaattactttttgaaagatgtttccactaggtggaaccgaaagaaacggtgccaaacacaccttacaacaagaaaatatttgtaaaaaaattattttgaataagatgtctaaaaatagaaagcgtgtatactttaggacggaggaatacatatgtatgattgggaaaaccgaaaacgtacacctcctcgctgcaatacgctggtgacttggcagttcgatcgcacccagcggataaagatgagcacggagaactcacaaggcacagccgcacaggcaggcaccagcgcgaacgcatggacgggcggcccctgagacgtgccgcccagctggcccgctgcgcccacacgtggcgcggagctgcgcgcggctcggccacgttataagccacgcgcgctggccgtcgccgcacctcctgactactgcacactcgtctccgcagtttgaaacgaagcccgcggctactgcaagctactccgtctccgtagctaaaggagaggtaggtttttatttggcgacgac

SEQ ID NO: 144 - DNA, 1500 bp, Zea mays
atttaaatgtgttggataatcttttgcatggatatgtgttgtgaattcgcaccatgtgcccacgaaagcagcatggggatcgccccaccaatttttttttaccagctctaactctcaaccagaaaacatgcaaatttatttgtcattgcacaccagcaacctagggatggtaatcccaaaatgcaatgatttttagagcatagatgtgggcgaatttacctaactatggatatgttaattgacaataaaacaccataaccactgggttcatgggtacgagtatggttttgtacatgaaagaataaacttatgagagtgtgtatatactcaacatacaagtataattcccaaagccatctccaacctattgtagtccaaaatatgcatggtccaacaagcacacctattgacatgcatataagccatcacatatatatatacactaatttttactattacatatgttatatatttatagatatatgttatttgtttatattgtcagtgtttactgcgtgtgttatattttttttcttaggtacggtgtaggtaaccaccgtgtctatctcgacacgcgtacgggcacaaaattacatcaacacatggtatgagatttttcatgtgtcaaataaattttgatggctagtttaaaaacttaaatcactcatgagattaccggagacgattgaggggaaaatttcctagtattacggacggaatttaagtttttcaaactagccctaataaaataaatatgggtatgtaggtatgagcgcgataccacctgttgcggcgggactgcaggtttggtgacagctagaaacatgcatttaggtgttgaatcttgattatttgcagttaatcgtgcttgctgtgttgccgcaaacacgagattcacaccctgatgagcggagccaggctgcccttgcttcgattcacggtggccgtcgtcccggccaggccagcacaccagtccaatccacatagcaacaaccgcgcctcggtcagttatagatgcgtggccttctgaaacaaaccctcatatggggtcacgccgcactcacacatgcatccataaaccctcagcagagccttgtgtcgcgtcctctcctcgataacccaggccacatcgtccttccgcgccgcgccgccggcgacctaacaacccagaggcctcagcaccgcacgcttgcacgtacgtccaggcgcgctcgccgttacgcccacggggatccaggctttccttcgctgccgttgctggtcgagtgcgccacgccgaaaggtgatcgagctgacgagcgctagacgccaccggccggcgcggcgtggcaaggcaagacgccgtgcgggtctcgccctcgtcagctataagaccgcatccccccctgcggagggaggcacacacacagacacagcgctctcactagcctcgcattccgtccctgcagtgcaggggcaggccggtgaggtctgggagaggaggaggaggaggaggaggag

SEQ ID NO: 145 - DNA, 2589 bp, Arabidopsis thaliana
atggtatcaagatcttattcaaacctcttggatcttgcttctggtaacttccattcgttttctcgagaaaagaagaggtttccaagagtagcaactgtcactggtgtcttatctgagctagatgatgataacaacagcaacagtgtctgctctgatgctccttcttccgtcacacaagatcgaatcatcatcgttggaaaccagcttcctattaaatcacatcggaactctgctggtaaattgagttttagttgggacaatgactcgcttctcttgcagcttaaagatggtatgcgtgaagatatggaagttgtctacattggttgccttaaggaacagattgatacagttgagcaagatgatgtttctcaaaggttgcttgagaatttcaaatgtgttcctgcttatatcccacctgagctattcactaagtactatcatggattctgtaagcaacatctatggcctttgtttcactacatgcttcccttaactcctgatcttggtggtagatttgatcgttctttatggcaagcttatctttcggttaacaagatctttgctgataaagtgatggaagtgattagtcctgatgatgattttgtttgggttcatgactatcacttaatggttttgcctacatttctaaggaagaggtttaatagagtaaagcttggttttttccttcatagcccgttcccttcctctgagatttaccgtactcttccagtgagaaatgagctcttacgtgcactcctcaacgctgatttgattggctttcatacctttgactatgcaagacacttcctttcttgttgtagcaggatgcttggtttatcctatcagtccaaacgtggaaccatagggcttgagtattatggtcgaacggttagtatcaagattcttcctgtggggattcatatcagccagcttcagtcaattttaaacctcccagagactcagaccaaagttgctgagctaagagatcagttcttggatcagaaagttcttctcggtgttgatgacatggacatcttcaaaggaatcagcctcaaactcttggcaatggaacaacttctcacacagcatcccgagaagagaggtcgagttgtacttgtccagattgcaaaccctgcaagaggtcgtgggaaagacgttcaggaggttcagtctgaaactgaagccacggttaaaaggatcaatgaaatgtttggaaggccgggctaccaacccgtggttctgattgatacaccgcttcaattctttgagaggattgcttactatgtcattgcagagtgttgtcttgttacagcggtaagagatggtatgaatcttataccttatgagtacattatctgcaggcaaggtaatccgaaactcaacgagactataggccttgacccttctgctgcaaagaagagtatgcttgttgtctctgagtttattggttgttctccttctttaagcggcgccattagagtaaatccgtggaacattgatgctgtgactgaagcaatggactatgcattgatagtttcagaagcagagaagcaaatgcgtcacgagaagcatcacaaatatgttagcacacatgatgttgcttattgggcgcgtagctttatacaagatcttgaaagggcttgcggggatcatgtgaggaagaggtgttgggggattggattcgggttaggctttagagttgtggcgcttgatccgagttttaaaaagctttcgattgagcacattgtctcagcttataagagaaccaagaaccgagccattttgttggattatgatggcacaatggtgcagccaggttccattaggacaacaccaacccgcgaaacaatcgaaatcttgaacaacctgtctagtgatcccaagaatatcgtgtacctcgtcagtgggaaagacagaaggacactaactgaatggttttcttcatgtgacgatctcggtttgggtgcagagcacgggtattttataaggccaaatgatggaacagactgggaaacgtcgagtttggtatcaggttttgagtggaaacaaatagcagagccagtgatgagactttacactgagactacagatggatcaacaatagagactaaagagactgctctcgtttggaattaccaattcgcagatcctgattttggatcttgtcaagccaaagagcttatggaacacctcgaaagcgtgcttaccaatgatccagtctctgtcaagactggacaacaactcgttgaagttaaaccacagggtgtgaacaaaggtcttgtggcagagaggcttctaacaacgatgcaagaaaaagggaaacttttggatttcattctctgcgtcggtgatgatcggtctgatgaggatatgtttgaggtgataatgagtgctaaagatggtccagctttgtctcctgtggctgagatattcgcttgcaccgttggacaaaagccaagcaaagcaaaatactatttagacgatactgcggagataatcagaatgctggacggtctagccgctaccaacacaactatctctgatcaaactgattcaaccgccactgttccaactaaagatctgttttaa

SEQ ID NO: 146 - protein, 862 aa, Arabidopsis thaliana
MVSRSYSNLLDLASGNFHSFSREKKRFPRVATVTGVLSELDDDNNSNSVCSDAPSSVTQDRIIIVGNQLPIKSHRNSAGKLSFSWDNDSLLLQLKDGMREDMEVVYIGCLKEQIDTVEQDDVSQRLLENFKCVPAYIPPELFTKYYHGFCKQHLWPLFHYMLPLTPDLGGRFDRSLWQAYLSVNKIFADKVMEVISPDDDFVWVHDYHLMVLPTFLRKRFNRVKLGFFLHSPFPSSEIYRTLPVRNELLRALLNADLIGFHTFDYARHFLSCCSRMLGLSYQSKRGTIGLEYYGRTVSIKILPVGIHISQLQSILNLPETQTKVAELRDQFLDQKVLLGVDDMDIFKGISLKLLAMEQLLTQHPEKRGRVVLVQIANPARGRGKDVQEVQSETEATVKRINEMFGRPGYQPVVLIDTPLQFFERIAYYVIAECCLVTAVRDGMNLIPYEYIICRQGNPKLNETIGLDPSAAKKSMLVVSEFIGCSPSLSGAIRVNPWNIDAVTEAMDYALIVSEAEKQMRHEKHHKYVSTHDVAYWARSFIQDLERACGDHVRKRCWGIGFGLGFRVVALDPSFKKLSIEHIVSAYKRTKNRAILLDYDGTMVQPGSIRTTPTRETIEILNNLSSDPKNIVYLVSGKDRRTLTEWFSSCDDLGLGAEHGYFIRPNDGTDWETSSLVSGFEWKQIAEPVMRLYTETTDGSTIETKETALVWNYQFADPDFGSCQAKELMEHLESVLTNDPVSVKTGQQLVEVKPQGVNKGLVAERLLTTMQEKGKLLDFILCVGDDRSDEDMFEVIMSAKDGPALSPVAEIFACTVGQKPSKAKYYLDDTAEIIRMLDGLAATNTTISDQTDSTATVPTKDLF

SEQ ID NO: 147 - DNA, 2589 bp, Arabidopsis thaliana
atgtcgccggaatcttggaaagaccagcttagtctggtttcggctgatgattatcggatcatgggtcgaaatcggatccccaatgccgtcacgaagctttccggtctcgaaaccgacgatcctaacggcggcgcgtgggttacgaaaccgaaacgaatcgtggtttcgaatcagcttcctcttcgtgctcacagagacatttcgtcgaacaagtggtgctttgaattcgacaatgacagtctttacttacaactcaaagatgggtttcctccggagacggaagtcgtctacgtcggatctttaaacgccgacgtcttaccttcagagcaagaggacgtctctcagttcttgcttgagaagtttcagtgtgttcctactttcttacctagtgacttgctcaacaagtattaccatggtttctgtaaacactatctctggcccatttttcactatcttcttcctatgacgcaagctcaaggctctctctttgatcgttcgaattggagagcgtacacgactgttaacaagatcttcgctgataagatcttcgaagtgctaaacccggatgatgattacgtctggattcatgattatcacctcatgattttgcccacttttttgaggaacaggtttcatcggataaagcttgggattttcctccatagtccctttccttcgtcggagatttaccgtactcttcctgtgagagacgagattctcaaagggtttctgaattgcgatttggttggtttccacacgtttgattacgctaggcatttcttgtcttgttgtagtaggatgcttggtcttgattacgaatctaaaagaggctacattggtcttgaatattttggaagaacggtgagcatcaagatattgcccgttgggattcatatggggcagattgaatcgataaaggcttcggagaaaactgcagagaaagtgaagagattgagagaaaggttcaaggggaacattgtgatgttaggtgtggatgatttggatatgttcaaaggtattagcttgaagttttgggcgatgggtcagcttcttgaacagaacgaagagcttcgtgggaaagtggttctcgtgcagattactaatcctgctcgtagttcaggtaaggatgttcaagatgtagagaaacagataaatttgattgctgatgagatcaattctaaatttgggagacctggtggttataagcctattgtgtttatcaatggacctgttagtactttggataaagttgcttattacgcgatctcggagtgtgttgtcgtgaatgctgtgagagatgggatgaatttggtgccttataagtacacagtgactcggcaagggagccctgctttggatgcagctttaggttttggggaggatgatgttaggaagagtgtgattattgtttctgagttcatcggttgttctccatctctgagtggtgcgatccgtgttaatccgtggaacatcgatgcagtcactaacgccatgagctctgcaatgacgatgtccgacaaagagaaaaatctgcgccaccagaagcatcataagtacataagctctcacaatgttgcctattgggcgcggagttatgaccaagatcttcaaagggcgtgcaaagatcattacaacaagagattctggggagtcggattcggtctttttttcaaggttgttgcgttagatccgaatttcagaaggctctgtggtgaaaccatagtccccgcgtataggagatcaagcagtaggttgatcctattggactatgatgggacaatgatggatcaggatactctggataaaaggccaagtgatgatcttatctcgcttctcaatcgcttatgtgacgaccccagcaatctagtctttattgttagtggtcgaggtaaggaccctctcagcaaatggtttgactcttgcccaaatcttggtatctcagctgaacatggttatttcactagatggaactcaaattccccttgggaaacaagtgaattgcctgcggatttaagctggaagaaaatagctaaaccagtgatgaatcactatatggaagcgactgatggatcattcatagaggagaaagagagtgctatggtgtggcaccaccaagaagctgaccattcatttggttcttggcaagctaaggagcttcttgatcatctagagagtgttctcaccaatgagcctgttgttgtcaagagaggccagcacatagtagaagttaaacctcagggagtaagcaaaggaaaggtggtggagcatttgatagcaacgatgaggaacaccaaagggaagagaccggactttttgttgtgcataggtgatgaccggtctgatgaagacatgtttgatagcatagtgaagcaccaagatgtttcctctattggtctcgaagaggtctttgcgtgcacagttggtcagaaaccgagcaaggccaagtactatctcgatgataccccaagtgttatcaagatgcttgaatggttggcctcagcttcagatggatcaaagcatgagcaacagaagaaacagagcaagttcacttttcaacagcctatgggacaatgtcgaaagaaagcatag

SEQ ID NO: 148 - protein, 862 aa, Arabidopsis thaliana
MSPESWKDQLSLVSADDYRIMGRNRIPNAVTKLSGLETDDPNGGAWVTKPKRIVVSNQLPLRAHRDISSNKWCFEFDNDSLYLQLKDGFPPETEVVYVGSLNADVLPSEQEDVSQFLLEKFQCVPTFLPSDLLNKYYHGFCKHYLWPIFHYLLPMTQAQGSLFDRSNWRAYTTVNKIFADKIFEVLNPDDDYVWIHDYHLMILPTFLRNRFHRIKLGIFLHSPFPSSEIYRTLPVRDEILKGFLNCDLVGFHTFDYARHFLSCCSRMLGLDYESKRGYIGLEYFGRTVSIKILPVGIHMGQIESIKASEKTAEKVKRLRERFKGNIVMLGVDDLDMFKGISLKFWAMGQLLEQNEELRGKVVLVQITNPARSSGKDVQDVEKQINLIADEINSKFGRPGGYKPIVFINGPVSTLDKVAYYAISECVVVNAVRDGMNLVPYKYTVTRQGSPALDAALGFGEDDVRKSVIIVSEFIGCSPSLSGAIRVNPWNIDAVTNAMSSAMTMSDKEKNLRHQKHHKYISSHNVAYWARSYDQDLQRACKDHYNKRFWGVGFGLFFKVVALDPNFRRLCGETIVPAYRRSSSRLILLDYDGTMMDQDTLDKRPSDDLISLLNRLCDDPSNLVFIVSGRGKDPLSKWFDSCPNLGISAEHGYFTRWNSNSPWETSELPADLSWKKIAKPVMNHYMEATDGSFIEEKESAMVWHHQEADHSFGSWQAKELLDHLESVLTNEPVVVKRGQHIVEVKPQGVSKGKVVEHLIATMRNTKGKRPDFLLCIGDDRSDEDMFDSIVKHQDVSSIGLEEVFACTVGQKPSKAKYYLDDTPSVIKMLEWLASASDGSKHEQQKKQSKFTFQQPMGQCRKKA

SEQ ID NO: 149 - DNA, 2586 bp, Glycine max
atggcttcaagatcatatgctaatctctttgacttagctagtggagactttcttgattttccttgcaccccaagagctcttccaagggttatgactgttcctggaattatttcggacctggatggttatggttgtaatgatggggattcagatgttagttcttctggatgtagggagcggaaaatcattgtggcaaacatgttgccagtgcaggctaaaagagatatagaaactgctaaatgggttttcagttgggatgaggattcaattttgttacaattaaaagatggtttttctgctgatagtgaggtaatctatgtgggttctctcaaggttgaaatagatgcctgtgagcaggatgcagttgctcagagattgctagatgaatttaattgtgtacctacctttcttccccatgatctccaaaaaaggttctaccttggattttgtaagcagcaactttggcctctatttcattatatgctacctatatgcccagatcacggtgatcgctttgaccgtatactttggcaggcttatgtttctgcaaacaaaatatttgcagacaaggtcatggaagtaattaatcctgatgatgattttgtttgggttcatgattatcacttaatggttttgcctactttcttgaggaagcgatataatcgggttaaacttgggttctttctgcatagtcctttcccttcatctgaaatctaccgaactttaccagtaagggatgaaattttgaggggattgttgaactctgatttaattggctttcatacatttgattatgctcgccactttctttcttgctgcagtagaatgctaggtctggactatgaatctaagcgaggacatatagggcttgattactttggccgcactatatttattaaaattttgcctgtaggcattcacatgggtaggcttgaatctgtgttaaatctttcttctacatctgctaaactaaaagaggttcaggaagagtttaaggataagaaagtaattcttggtattgatgacatggatatttttaagggcattagtctgaaacttctagctgtggagcatctgctgcagcagaatccagatttgcagggcaaagttgtcctagttcaaattgtaaatcctgcaaggggctcggggaaggatgttcaggaagcaaagaacgaaacatatttaattgcccagagaatcaacgatacatatagctcaaataattatcagccagtcattctcattgaccgccctgttcctcgctttgagaagagtgcctattatgctgtagctgaatgttgcattgttaatgctgtaagggatggtatgaacttagtcccatacaaatatatcgtctgcagacagggaactgcacaactagatgaagcattggatagaaaaagtgattctcctcgtacaagcatgcttgtggtgtctgagttcattggttgttcaccttctcttagtggggcaataagggtcaatccctgggacatagatgccgtagccgatgctatgtatgcagcccttacaatgagtgtttcagagaagcagttgcgccatgagaaacactatcggtatgtgagttctcatgatgttgcatattgggcgcacagctttatgctggatttggagagagcctgcaaagatcattacaccaaaagatgctggggatttggtttgggcttggggttcagagttgtttctctttctcatggtttcaggaagctgtcaattgaccatattgtttcagcatacaagagaaccaatagaagggccatctttcttgattatgatggtactgttgtacctcaatcttccataagtaaaacccccagccctgaagtcatctctgtcttaaatgctctgtgtaacaatcccaagaatattgtgttcattgttagtgggagggggagggattcactgagtgaatggtttacttcatgccaaatgcttggacttgcagcagaacatgggtactttttaaggtggaacaaagattcagaatgggaagcaagtcacttatctgcggaccttgattggaaaaagatggtggaacctgtgatgcagttgtatacagaagcaactgatggttctaatattgaagttaaggagagtgctttggtgtggcatcatcaagatgcagaccctgattttggttcttgccaagccaaagaattgttggatcacttggaaagtgtgcttgctaatgaaccagcagctgttacgagaggtcagcatattgttgaagttaagccacagggaataagcaaggggttggtagctgaacaggttcttatgaccatggttaatggcggcaatccaccagattttgtgctgtgcattggagatgataggtccgatgaggacatgtttgagagcattttgaggacagtttcgtgcccatcattaccatcagctccagagatctttgcctgcactgtgggtaggaagcctagcaaggccaagtattttcttgatgatgcttctgatgttgtgaagttgcttcagggccttgctgcttcatccaatccaaaacccaggcatcttgctcattctcaagtctcttttgagagcacagtttga

SEQ ID NO: 150 - protein, 861 aa, Glycine max
MASRSYANLFDLASGDFLDFPCTPRALPRVMTVPGIISDLDGYGCNDGDSDVSSSGCRERKIIVANMLPVQAKRDIETAKWVFSWDEDSILLQLKDGFSADSEVIYVGSLKVEIDACEQDAVAQRLLDEFNCVPTFLPHDLQKRFYLGFCKQQLWPLFHYMLPICPDHGDRFDRILWQAYVSANKIFADKVMEVINPDDDFVWVHDYHLMVLPTFLRKRYNRVKLGFFLHSPFPSSEIYRTLPVRDEILRGLLNSDLIGFHTFDYARHFLSCCSRMLGLDYESKRGHIGLDYFGRTIFIKILPVGIHMGRLESVLNLSSTSAKLKEVQEEFKDKKVILGIDDMDIFKGISLKLLAVEHLLQQNPDLQGKVVLVQIVNPARGSGKDVQEAKNETYLIAQRINDTYSSNNYQPVILIDRPVPRFEKSAYYAVAECCIVNAVRDGMNLVPYKYIVCRQGTAQLDEALDRKSDSPRTSMLVVSEFIGCSPSLSGAIRVNPWDIDAVADAMYAALTMSVSEKQLRHEKHYRYVSSHDVAYWAHSFMLDLERACKDHYTKRCWGFGLGLGFRVVSLSHGFRKLSIDHIVSAYKRTNRRAIFLDYDGTVVPQSSISKTPSPEVISVLNALCNNPKNIVFIVSGRGRDSLSEWFTSCQMLGLAAEHGYFLRWNKDSEWEASHLSADLDWKKMVEPVMQLYTEATDGSNIEVKESALVWHHQDADPDFGSCQAKELLDHLESVLANEPAAVTRGQHIVEVKPQGISKGLVAEQVLMTMVNGGNPPDFVLCIGDDRSDEDMFESILRTVSCPSLPSAPEIFACTVGRKPSKAKYFLDDASDVVKLLQGLAASSNPKPRHLAHSQVSFESTV

SEQ ID NO: 151 - DNA, 2475 bp, Oryza sativa
atgccctccctccccaactccggcgacgagggcggcgccccgcctccgactccgccgccgccgggggcgcgccgcgtggtggtcgcccaccgcctccccctccgcgcggatcccaatccgggcgcgccgcacgggttcgacttctccctcgacccgcacgcgctcccgctccagctctcccatggcgtcccccgccccgtcgtcttcgtcggcgtgctcccctccgccgtcgccgaggccgtccaggcgtccgacgagctcgcggccgatctcctcgcgcggttctcatgctacctggtgttcctccccgccaagctccacgccgacttctacgacggcttctgcaagcactacatgtggccgcatctccactatctcctcccgctcgcgccctcctacggcaggggcggcggcctccccttcaacggcgacctctaccgcgccttcctcaccgtcaacacccacttcgccgagcgcgtgttcgagctcctcaaccccgacgaggacctggtgttcgtccacgactaccacctctgggcgttccccaccttcctccgccacaaatccccgcgcgcccgcataggtttcttcctccactctcccttcccctcctccgagctcttccgcgccatccccgtccgcgaggacctcctccgcgccctcctcaacgccgatctcgtgggcttccacaccttcgattacgcgcgccacttcctctccgcgtgctccagggtcctcggcctctccaaccgctcgcgccgcggctacatcgggatcgagtacttcggccgcacggtggtcgtcaagatcctctccgtcggcatcgacatgggccagctccgcgcggttctgccgttgccggagacggtcgccaaggccaacgagattgctgacaagtacaggggacgacagctgatgctcggcgtggacgacatggatttgttcaaggggattgggctcaagctcttggccatggagaggctgctggagtcgcgggcggacttgcgtggccaggtggtcctcgtgcagatcaacaacccggcgcggagccttggccgcgacgtcgacgaggtccgcgcggaggtgctggcgatccgtgaccggatcaatgcccggttcggctgggcggggtacgagccggtggttgtgatcgacggcgccatgccgatgcacgacaaggtggcgttctacacgtccgcggacatctgcatcgtgaatgccgtgcgcgacgggctgaacaggataccgtacttctacaccgtgtgccggcaggagggcccggttcccaccgctcctgccgggaagccgaggcagagcgccatcatcgtgtcagagtttgtcgggtgctcgccgtcgctgagcggcgcgatccgcgtcaacccctggaacgtggacgacgtcgcggacgccatgaacacggcgctgaggatgagcgacggcgagaagcagctgcgccaggagaagcactacaggtacgtgagcacgcacgacgtcgtctactgggcgcagtcgttcgaccaggacctgcagaaggcctgcaaggacaactcgtccatggtgatcctcaacttcggcctcggcatgggcttccgcgtcgtcgcgctcggccccagcttcaagaaactctcacccgagctcattgaccaagcataccgccagactggcaacaggctcatcttactggactacgatggcacagtgatgccacaggggctgatcaacaaggcgcccagtgaggaagtgatccgtactctgaatgaactgtgctctgatccgatgaacaccgttttcgtcgtcagcgggcggggcaaggatgaactggctgaatggtttgcaccatgcgacgagaagctggggatctctgcagagcacggctacttcacaaggtggagcagggattctccctgggagtcatgcaagttggtgacacattttaattggaagaacatcgcagggcctgtaatgaagcactacagtgatgcaaccgatgggtcatacatcgaggttaaagaaacatcactagtgtggcactatgaggaagccgatccggattttggatcatgccaggccaaagagctccaggaccacctgcagaatgtgcttgcgaacgagccagtctttgtgaagagcggccatcagattgtggaagttaatcctcagggtgtgggcaaaggagtcgccgtgcgtaatctcatttcaaccatgggaaatcgtggcagcttgccagatttcatcctctgcgtcggcgatgaccggtcggatgaagacatgttcgaggctatgatcagcccttcgcctgcgttcccggagactgcacagatcttcccctgcactgttggcaacaagccgagcttggccaagtactacctggatgacccggctgatgttgtgaagatgctccagggcctgacggactcgccgacccagcagcaaccgcggccccccgtctcgttcgaaaactcgctagatgattga

SEQ ID NO: 152 - protein, 824 aa, Oryza sativa
MPSLPNSGDEGGAPPPTPPPPGARRVVVAHRLPLRADPNPGAPHGFDFSLDPHALPLQLSHGVPRPVVFVGVLPSAVAEAVQASDELAADLLARFSCYLVFLPAKLHADFYDGFCKHYMWPHLHYLLPLAPSYGRGGGLPFNGDLYRAFLTVNTHFAERVFELLNPDEDLVFVHDYHLWAFPTFLRHKSPRARIGFFLHSPFPSSELFRAIPVREDLLRALLNADLVGFHTFDYARHFLSACSRVLGLSNRSRRGYIGIEYFGRTVVVKILSVGIDMGQLRAVLPLPETVAKANEIADKYRGRQLMLGVDDMDLFKGIGLKLLAMERLLESRADLRGQVVLVQINNPARSLGRDVDEVRAEVLAIRDRINARFGWAGYEPVVVIDGAMPMHDKVAFYTSADICIVNAVRDGLNRIPYFYTVCRQEGPVPTAPAGKPRQSAIIVSEFVGCSPSLSGAIRVNPWNVDDVADAMNTALRMSDGEKQLRQEKHYRYVSTHDVVYWAQSFDQDLQKACKDNSSMVILNFGLGMGFRVVALGPSFKKLSPELIDQAYRQTGNRLILLDYDGTVMPQGLINKAPSEEVIRTLNELCSDPMNTVFVVSGRGKDELAEWFAPCDEKLGISAEHGYFTRWSRDSPWESCKLVTHFNWKNIAGPVMKHYSDATDGSYIEVKETSLVWHYEEADPDFGSCQAKELQDHLQNVLANEPVFVKSGHQIVEVNPQGVGKGVAVRNLISTMGNRGSLPDFILCVGDDRSDEDMFEAMISPSPAFPETAQIFPCTVGNKPSLAKYYLDDPADVVKMLQGLTDSPTQQQPRPPVSFENSLDD

SEQ ID NO: 153 - DNA, 2637 bp, Oryza sativa
atgttctcgcgatcctacaccaacctggtcgatctcgccaacggcaacctctccgccctggactatggtggcggagggggagggggcggcggcggcaacggggccgggggccggccgccgcgggcgaggcggatgcagcggacgatgacgacgcccgggacgctggcggagctcgacgaggagcgggccgggagcgtcacctccgacgtgccctcgtcgctcgccagcgaccgcctcatcgtcgtcgccaacaccctccccgtgcgctgcgagcgccgccccgacgggcgcgggtggagcttctgctgggacgaggactccctcctcctccacctccgcgacggcctccccgatgacatggaggtcctctacgtcggctccctccgcgccgacgtgccgtccgccgagcaggacgacgtcgcgcaggcgctcctcgaccggttccgctgcgtcccggctttcctccccaaggacgtcttggacagattctaccatggcttctgcaagcagacgctgtggccgctcttccactacatgctccccttcacctccgaccatggcggccgcttcgatcgctcccagtgggaggcatacgtcctcgccaacaagctcttctcccagcgcgtcatcgaggtcctcaaccccgaggatgactacatctggatccacgattaccacctcctcgccctcccgtccttccttcgccgtcggttcaacaggctccgcatcggtttcttcctgcacagcccgttcccttcgtcggaactctaccgttccctccctgttcgcgacgagatcctcaaatcactgctaaactgcgatctgattgggttccacacctttgattacgcgcggcatttcctgtcctgctgcagccggatgctggggatcgagtaccagtcgaagaggggatatatcggtctcgattactttggccgcactgttgggataaagatcatgcctgttgggattaacatgacgcagctgcagacgcagatccggctgcctgatcttgagtggcgtgtcgccgaactccggaagcagtttgatgggaagactgtcatgctcggtgtggatgatatggacatatttaaggggattaatctgaaagttcttgcgtttgagcagatgctgaggacacacccaaaatggcagcgcaaggcagtgttggtgcagattgcaaacccaaggggtggtggtgggaaggaccttgaagagatacaggctgagattgatgagagttgcaggaggataaatgcacaattttcacggccaggatatgttcctgtggtgattatcaatagagccctttcaagtgtggagaggatggcttattataccgtggcagagtgtgtcgttgtaactgcagtgagggatgggatgaacctcacaccatatgagtatattgtctgtagacagggatttccagatttggatggttctggggatgatgggccaaggagaaagagtatgttagttgtgtccgaattcattggttgctcaccatcacttagtggagcaattcgggtaaacccttggaacattgatacaacagcagaggcaatgaacgagtcgattgctttatcagagaacgagaagcaactgcggcatgagaagcattacagatatgtcagctcacatgatgttgcctattggtccaagagctatattcatgatttggagagaagctgcagggaccattttaggaggaggtgctggggtattggactaggatttggatttagagtagttgctcttgaccgcaacttcaaaaagcttactgtggattctatcgttactgattacaagaattctaagagcagggttatactgctagactacgatggaacgctagtaccacaaactacaatcaacaggactccaaatgaaagtgttgttaaaatcatgaatgctctttgtgacgataagaagaatgttgtttttattgttagtggacgaggaagggatagccttgagaaatggttttccccttgccaggatcttggcattgctgccgaacatggctactttatgaggtggaccagagatgagcaatggcaattgaataaccagtgctcagaatttggatggatgcagatggccaagccagttatgaacctgtatacagaagcaaccgatggatcatatattgaaaccaaagagagtgctttggtctggcaccaccaagatgctgaccctggttttggatcttcacaagctaaagagatgctagatcatttggaaagtgttcttgctaatgagcctgtctgtgtaaagagtggccaacagattgtggaagtgaaaccgcagggtgtcagcaaaggatttgttgctgagaagatcctatcaacgctgacagagaacaagagacaggcagattttgttctctgcataggcgatgatagatcagacgaggatatgtttgaaggaattgctgatatcatgagaaggagcatagttgatccccaaacatcattatatgcgtgcacagtcggccagaagccaagcaaggctaagtactatttggacgatactaatgatgttttgaacatgcttgaggcgcttgcagatgcatcagaggagactgattcacaggaagatgcagaagagataacatctatcccggacccggaatag

SEQ ID NO: 154 - protein, 878 aa, Oryza sativa
MFSRSYTNLVDLANGNLSALDYGGGGGGGGGGNGAGGRPPRARRMQRTMTTPGTLAELDEERAGSVTSDVPSSLASDRLIVVANTLPVRCERRPDGRGWSFCWDEDSLLLHLRDGLPDDMEVLYVGSLRADVPSAEQDDVAQALLDRFRCVPAFLPKDVLDRFYHGFCKQTLWPLFHYMLPFTSDHGGRFDRSQWEAYVLANKLFSQRVIEVLNPEDDYIWIHDYHLLALPSFLRRRFNRLRIGFFLHSPFPSSELYRSLPVRDEILKSLLNCDLIGFHTFDYARHFLSCCSRMLGIEYQSKRGYIGLDYFGRTVGIKIMPVGINMTQLQTQIRLPDLEWRVAELRKQFDGKTVMLGVDDMDIFKGINLKVLAFEQMLRTHPKWQRKAVLVQIANPRGGGGKDLEEIQAEIDESCRRINAQFSRPGYVPVVIINRALSSVERMAYYTVAECVVVTAVRDGMNLTPYEYIVCRQGFPDLDGSGDDGPRRKSMLVVSEFIGCSPSLSGAIRVNPWNIDTTAEAMNESIALSENEKQLRHEKHYRYVSSHDVAYWSKSYIHDLERSCRDHFRRRCWGIGLGFGFRVVALDRNFKKLTVDSIVTDYKNSKSRVILLDYDGTLVPQTTINRTPNESVVKIMNALCDDKKNVVFIVSGRGRDSLEKWFSPCQDLGIAAEHGYFMRWTRDEQWQLNNQCSEFGWMQMAKPVMNLYTEATDGSYIETKESALVWHHQDADPGFGSSQAKEMLDHLESVLANEPVCVKSGQQIVEVKPQGVSKGFVAEKILSTLTENKRQADFVLCIGDDRSDEDMFEGIADIMRRSIVDPQTSLYACTVGQKPSKAKYYLDDTNDVLNMLEALADASEETDSQEDAEEITSIPDPE

SEQ ID NO: 155 - DNA, 2583 bp, Oryza sativa
atggtttctcggtcctactccaacctgctggacctggccaccggcgcggcggaccaggcgccggcgccggcggcgctcggcgcgctccggcggcggctgccgcgggtggtgaccaccgcggggctcatcgacgactccccgctgtccccctcgacgccgtccccgtcgccgcggccgcgcaccatcgtggtcgccaaccacctccctatccgggctcaccgcccggcgtcgccgtcggagccgtggaccttctcctgggacgaggactccctcctccgccacctccagcactcgtcctcctcccccgccatggagttcatctacatcggctgcctccgcgacgacatcccgctggccgaccaggacgccgtcgcgcaggcgctcctcgagtcgtacaactgcgtgccggcgttcctgccccccgacatcgccgagcgctactaccatggcttctgcaagcagcatctgtggccgctgttccactacatgctgccgctctcccccgacctcggcggccgcttcgaccgcgcgctgtggcagtcgtacgtgtcggcgaacaagatcttcgcggacaaggtgctcgaggtgatcaacccggacgacgacttcgtgtgggtgcacgactaccacctcatggtgctcccaaccttcctccgcaagcgcttcaaccgcatcaagctcggcttcttcctccactcgccgttcccctcgtcggagatctacaagacgctccccgtccgggaggagctcctgcgcgcgctgctcaactccgacctcatcggcttccacaccttcgactacgcgcgccacttcctctcctgctgcggccggatgctggggctctcctacgagtccaagcgtggccacatctgcttggagtactacggccggacggtgagcatcaagatcctcccggtgggggtgaacatggggcagctcaagacggtgctcgcgttgccggagacggaggcgaaggtggcagagctgatggcgacttactccgggaaggggagggtcgtcatgctgggcgtcgacgacatggacatcttcaaggggatcagcctcaagctgctcgccatggaggagctgctgcggcagcaccccgagtggcgcggcaagctggtgctcgtccaggtcgcgaacccggcgcgcggccgcggcaaggacgtcgacgaggtgaagggggagacgtacgccatggtgcggcggatcaacgaggcgtacggcgcgcccgggtacgagccggtggtgctcatcgacgagccgctccagttctacgagcgcgtggcgtactacgtcgtcgccgaggtgtgcctggtgaccgcggtccgcgacggcatgaacctgatcccctacgagtacatcgtgtccaggcagggcaacgaggcgctcgacaggatgctgcagccgagcaagccggaggagaagaagagcatgctggtggtgtccgagttcatcgggtgctcgccgtcgctgagcggcgcggtgagggtgaacccgtggaacatcgaggccgtggcggacgccatggagagcgcgctcgtgctgccggagaaggagaagcggatgcgccacgacaagcactaccgctacgtggacacccacgacgtgggctactgggcgaccagcttcctgcaggacctcgagaggacgtgcaaggatcacgcgcagcggcggtgctggggcatcggcttcgggctgcggttcagggtggtgtcgcttgacctcagcttcaggaagctcgccatggagcacattgtcatggcgtaccggagggcgaagacgcgcgccatcctgctcgactacgacggcacgctcatgccgcaggcgatcaacaagagcccgagcgccaattccgtcgaaacgctgaccagcttgtgcagggacaagagcaacaaggttttcctctgcagcgggttcgagaagggaacactccatgactggttcccctgcgagaaccttggcttggcggctgagcacggttacttcctgaggtcatcgagggatgcagagtgggagatttccattccccccgcggactgcagctggaagcagatcgcggagccggtgatgtgcctgtacagggagaccacggacggctcgatcatcgagaacagggagacggtgctcgtctggaactacgaggacgcagaccctgacttcggttcatgccaagccaaggagctcgtcgaccacctcgagagcgtgctcgccaacgagcccgtctcggtgaagagcaccggccattccgttgaggtcaagccacagggcgtgagcaagggcctggtggcgcggcggctgctggcgagcatgcaggagaggggcatgtgcaccgacttcgtgctgtgcatcggggacgaccgctccgacgaggaaatgttccagatgatcacaagctccacctgcggcgagtcgctggcggccacggcggaggtcttcgcctgcaccgtcggccgcaagccgagcaaggccaagtactacctcgacgacacggcggaggtcgtcaggctgatgcagggcttggcctccgtctccaacgagctggctcgggcggcgagccccccggaggacgacgacgaatga

SEQ ID NO: 156 - protein, 860 aa, Oryza sativa
MVSRSYSNLLDLATGAADQAPAPAALGALRRRLPRVVTTAGLIDDSPLSPSTPSPSPRPRTIVVANHLPIRAHRPASPSEPWTFSWDEDSLLRHLQHSSSSPAMEFIYIGCLRDDIPLADQDAVAQALLESYNCVPAFLPPDIAERYYHGFCKQHLWPLFHYMLPLSPDLGGRFDRALWQSYVSANKIFADKVLEVINPDDDFVWVHDYHLMVLPTFLRKRFNRIKLGFFLHSPFPSSEIYKTLPVREELLRALLNSDLIGFHTFDYARHFLSCCGRMLGLSYESKRGHICLEYYGRTVSIKILPVGVNMGQLKTVLALPETEAKVAELMATYSGKGRVVMLGVDDMDIFKGISLKLLAMEELLRQHPEWRGKLVLVQVANPARGRGKDVDEVKGETYAMVRRINEAYGAPGYEPVVLIDEPLQFYERVAYYVVAEVCLVTAVRDGMNLIPYEYIVSRQGNEALDRMLQPSKPEEKKSMLVVSEFIGCSPSLSGAVRVNPWNIEAVADAMESALVLPEKEKRMRHDKHYRYVDTHDVGYWATSFLQDLERTCKDHAQRRCWGIGFGLRFRVVSLDLSFRKLAMEHIVMAYRRAKTRAILLDYDGTLMPQAINKSPSANSVETLTSLCRDKSNKVFLCSGFEKGTLHDWFPCENLGLAAEHGYFLRSSRDAEWEISIPPADCSWKQIAEPVMCLYRETTDGSIIENRETVLVWNYEDADPDFGSCQAKELVDHLESVLANEPVSVKSTGHSVEVKPQGVSKGLVARRLLASMQERGMCTDFVLCIGDDRSDEEMFQMITSSTCGESLAATAEVFACTVGRKPSKAKYYLDDTAEVVRLMQGLASVSNELARAASPPEDDDE

SEQ ID NO: 157 - DNA, 2574 bp, Solanum tuberosum
atgatgtctagatcgtataccaatcttttggatttggcatctgggaattttccagtaatgggaagagagagggataggcgacggatgtcgcgggtaatgacagttcctgggagtatatgtgaactggatgatgaccaggctgttagtgtttcttctgataatcaatcttcacttgctggtgatcggatgattgttgtggcaaatcagttgccattgaaagcgaaaaggagaccggataataagggctggagttttagttggaatgaggattctttgcttttgagacttaaggatggtttacctgaagatatggaagtattgtttgttgggtctttatctgttgatgttgatccaattgaacaggatgatgtttctagctatcttttggataaattcagatgtgtgccaacgtttcttccacctaatatcgtggaaaaatactatgagggattctgcaagaggcatttgtggccactttttcactacatgttaccattttcacctgaccatggaggccgctttgatcgttctatgtgggaagcatatgtttctgccaacaagatgttttcacagaaagtggttgaggtgcttaatcctgaggatgattttgtttggattcatgattatcatttgatggtgttgcccacgttcttgagaaggcggttcaatcgattgaggattgggtttttccttcacagtccatttccttcatctgagatttacaggacacttcctgttagagaggaaatacttaaggctcttctatgttctgaccttgttggattccacactttcgactatgctcgacatttcctttcgtgttgcagtcgaatgttgggtttagagtaccagtctaaaagaggttatataggattggaatattatggaaggacagtaggtatcaagattatgccagtagggatacatatgggtcatattgagtctatgaagaaaattgcagataaagagctgaagtttaaggagctcaaacaacaatttgaaggaaaaactgttctgcttggagttgatgacttggatattttcaaaggtatcaacttaaagcttctagcaatggagcacatgctcaaacagcaccccagttggcaagggcaggctgtgcttgttcagattgccaatcctatgaggggtaaaggaatagatttagaggaaatacaggctgagatacaggaaagctgcaagaggattaataagcaatttggcaagcctggatatgagcctatagtttatattgataggtccgtgtccagtagcgagcgtatggcttattatagtgttgctgaatgtgttgttgtcacagctgttagggatgggatgaacctgactccatatgaatacatcgtttgtcgacagggtgtatcgggtgcagaaacagattcaggtgtaggtgaacctgacaagagcatgctagttgtgtcagaattcattgggtgttctccttccttaagtggggcaatccgtattaatccatggaatgttgaggcaactgctgaggcaatgaatgaggctgtgtcaatggctgaacaagagaaacagctacgacatgagaagcattaccgttatgtcagcacccacgatgttgcttattggtcgagaagtttcttgcaagatatggagagaacttgtgctgatcactttaggaaaagatgctatggcattggtttaggctttgggtttagagttgtttccctagatcccaacttcaggaagctgtcaattgatgatattgtgaatgcttatatcaagtctaagagcagggccatattcctggactatgacggaactgtgatgccgcagaattctatcattaagtctcctagtgctaatgttatctccatcctgaataaactttctggtgatccaaacaacaccgtcttcattgttagtggaagagggagggaaagcctaaccaagtggttttctccttgtagaaaactaggacttgcagcagaacatggctactttttgagatgggaacgagaacagaaatgggaagtatgcagtcagacctctgattttgggtggatgcaacttgctgaacccgtgatgcaatcctatacagacgctacagatggttcttgcatagaaagaaaggaaagtgctatagtgtggcagtatcgtgatgcggattctggatttgggttttctcaggcaaaggagatgcttgatcatctggagagtgttttagcgaatgaaccggttgccgtgaaaagcggtcagcacattgtggaagtgaagcctcagggggtcaccaaaggtttagttgcagaaaaagtctttacatctttagcagtgaaaggaaaactggcggattttgtgctttgcattggtgatgatagatcagatgaagatatgtttgaaatcattggcgatgctttgtccagaaatattatttcatatgatgccaaggtatttgcttgcacagttggacaaaaacctagcaaagcaaagtattacttggatgacacatctgaggtggtgcttatgctagactcccttgctgatgccactgatactccagtgacttccgatgatgaacctgtggactccgactga

SEQ ID NO: 158 - protein, 857 aa, Solanum tuberosum
MMSRSYTNLLDLASGNFPVMGRERDRRRMSRVMTVPGSICELDDDQAVSVSSDNQSSLAGDRMIVVANQLPLKAKRRPDNKGWSFSWNEDSLLLRLKDGLPEDMEVLFVGSLSVDVDPIEQDDVSSYLLDKFRCVPTFLPPNIVEKYYEGFCKRHLWPLFHYMLPFSPDHGGRFDRSMWEAYVSANKMFSQKVVEVLNPEDDFVWIHDYHLMVLPTFLRRRFNRLRIGFFLHSPFPSSEIYRTLPVREEILKALLCSDLVGFHTFDYARHFLSCCSRMLGLEYQSKRGYIGLEYYGRTVGIKIMPVGIHMGHIESMKKIADKELKFKELKQQFEGKTVLLGVDDLDIFKGINLKLLAMEHMLKQHPSWQGQAVLVQIANPMRGKGIDLEEIQAEIQESCKRINKQFGKPGYEPIVYIDRSVSSSERMAYYSVAECVVVTAVRDGMNLTPYEYIVCRQGVSGAETDSGVGEPDKSMLVVSEFIGCSPSLSGAIRINPWNVEATAEAMNEAVSMAEQEKQLRHEKHYRYVSTHDVAYWSRSFLQDMERTCADHFRKRCYGIGLGFGFRVVSLDPNFRKLSIDDIVNAYIKSKSRAIFLDYDGTVMPQNSIIKSPSANVISILNKLSGDPNNTVFIVSGRGRESLTKWFSPCRKLGLAAEHGYFLRWEREQKWEVCSQTSDFGWMQLAEPVMQSYTDATDGSCIERKESAIVWQYRDADSGFGFSQAKEMLDHLESVLANEPVAVKSGQHIVEVKPQGVTKGLVAEKVFTSLAVKGKLADFVLCIGDDRSDEDMFEIIGDALSRNIISYDAKVFACTVGQKPSKAKYYLDDTSEVVLMLDSLADATDTPVTSDDEPVDSD

SEQ ID NO: 159 - DNA, 2181 bp, Crocosphaera watsonii
atgtcaaaaactatcattgtttccaatagacttccggtaaagatcgaaagaaaccaagccggagaatttgagtataaaaccagtgagggaggtctagctacagggcttgggtcggtttataaagaaggtgataatatatgggttgggtggccaggattagctgtcaacaaaactgaagacaaagaggaaatatgctctagattgaaagagtcaaatatgagtcctgtattcctcactaaaaatgaaatagaagaatactatgaaggctttagtaatgagaccctatggccaaacttccattattttaatcagtatgctgtatacagcgacgtattttggaatacctacaaaaaagtaaacaagaagtttgccaagaaacttgaggagataatcgaagacggggataagatttggattcatgactatcagttgttagttcttccggcaatgatcagagaaactcatcctaacagtagcattggattttttctccatatcccatttccttcctacgaatcatttagattattaccgtggagaacggatctcttgacaggtatgctgggagcagattttattggcttccacacctacgattatgtgcgtcactttctctcttctgtcaatagattggttggcataacggataatgatggtcacatgaatgtggggaataggttggctatggcagatgcaattcctatgggtattgattacaatcgatacgcacaggccgcagctgatcccgaaacactagcaagcgaggtaaagtatcgaatttctctgggtgatgtgaagttaatattatccatcgatagattggattattccaagggtataccccaaagattgcgagcttttgaacagtttatcgaagaaaatgaagaatttagggaagaggtttctttacttatactggtagttccatctcgagatcaggtgccgatgtatgccaatctcaagaaggaaatagaattgctagttggcagcatcaacggcaagtttggaactatcaactggaggccgatccattacttctacagaagctatcctttacatagcctaagtgccttttaccgaatgtcccacgtagcattggttactcctctaagggatgggatgaatctagtttgtaaagagtttgttgctagtaagttggacaaaaaaggtgtattaatattgagtgaaacggctggttctgccaaagagttgtcagacgcaattttaatcaatcccaatgatactaatcaaatggtcgaagccatgaaagaggctctgaagatgccagaggaggagcaaattgcacgaatggagaccatgcagaagtcattgaaaagatatgatatcaacgcttgggtaaaactcttcatgaagggattagaacaggtcaaagaggagcaagaaaatcttcggacaaaacccatttcttcagtggtcaaaaataaacttttgcaagaataccgtagctcaaaaaaacggatcattttccttgattatgacggcactttggtgggtttctatgctaatcctaatgactccgtaccagacgcagaattagaggagttgatgacgaagttaacggcagataccaacaatcaagtagttgtcatcagtggtagaggccgtgatttcttggagaaatggctctcaaaattcaatgttgatttcatcgccgagcatggggtttggcacaaagaaaatggaaaggagtgggagtgttttgtggaactagatacttcctggcaagaagaatttgatcgagtgctagagatgtatgtagatcgtacccctggctcttttatagagcgtaaggatttttccatggtatggcattacaggaaagtggagccaggtttgggtgaactaagatccagagaattggccaatcttttaaaatatttatccgccgacaaagatttacaagtccaagaaggtgatatggtcatcgaaattaaaaacgccagggtgaacaagggggttgctgccgcttcctggttgaagaaaaacgattacgatttctcttttgcctgtggtgatgactggaccgatgaggatacctttaaagccatgccagaggacgcatttaccgttaaagtcgggtcttcttcgtcggctgcaaaatatcgggttgagaactttaaggatatccgtaaactgttattgagcctagctaatcagtag

SEQ ID NO: 160 - protein, 726 aa, Crocosphaera watsonii
MSKTIIVSNRLPVKIERNQAGEFEYKTSEGGLATGLGSVYKEGDNIWVGWPGLAVNKTEDKEEICSRLKESNMSPVFLTKNEIEEYYEGFSNETLWPNFHYFNQYAVYSDVFWNTYKKVNKKFAKKLEEIIEDGDKIWIHDYQLLVLPAMIRETHPNSSIGFFLHIPFPSYESFRLLPWRTDLLTGMLGADFIGFHTYDYVRHFLSSVNRLVGITDNDGHMNVGNRLAMADAIPMGIDYNRYAQAAADPETLASEVKYRISLGDVKLILSIDRLDYSKGIPQRLRAFEQFIEENEEFREEVSLLILVVPSRDQVPMYANLKKEIELLVGSINGKFGTINWRPIHYFYRSYPLHSLSAFYRMSHVALVTPLRDGMNLVCKEFVASKLDKKGVLILSETAGSAKELSDAILINPNDTNQMVEAMKEALKMPEEEQIARMETMQKSLKRYDINAWVKLFMKGLEQVKEEQENLRTKPISSVVKNKLLQEYRSSKKRIIFLDYDGTLVGFYANPNDSVPDAELEELMTKLTADTNNQVVVISGRGRDFLEKWLSKFNVDFIAEHGVWHKENGKEWECFVELDTSWQEEFDRVLEMYVDRTPGSFIERKDFSMVWHYRKVEPGLGELRSRELANLLKYLSADKDLQVQEGDMVIEIKNARVNKGVAAASWLKKNDYDFSFACGDDWTDEDTFKAMPEDAFTVKVGSSSSAAKYRVENFKDIRKLLLSLANQ

SEQ ID NO: 161 - DNA, 2403 bp, Yarrowia lipolytica
atgctaccggaaatcatcaccccaaccgcggcgagagcgctcaatgtgcccatatctggacgggtcatcaactgtgtcacgaccctgccgtacgaaatctaccgcgagggagcgacgtacaaaattcgaccgcgacgtggcaactcggccctctactcggcgctggattatatgcagtctggcgacggagacaccacatggacatcgtcgctggtggcgtggacgggcgaaatcgcgctgccggccgccacgtcgctgccagacctggagctgtatcagaagctcacggagcaggacaaacacatgctcgaacgggagctgaccgaggcgcagggcggcacgccgactcacccgatctggacagactcgggcgacaccgtgtccacgggctacaacgaacagctgtcgcccacccgccgctacgcagaaaacattctgtggcccattctgcactacatccagggcgaacccaccgacgggcgcgacgagaaaaaatggtggagcgactacgaagacctcaaccgcaagtactgcgacaaggttctggacatctacaacgagggcgacgtcatctggatccacgactactacctgttcctgttgcccaaaatgatccgcgaaaagctgcccgacgcccggatcggcttcttcatgcatgcgccgttcccgtcgtcagagtactttcggtgtctggcaaagcgccaggagctgctgcagggcgtgctggcgtcgaatctcatttccacccagagcgaggcccacaaacggcactttatgagcgcatgttcccgcattgtgggcgcagaaacagccacgccaacgtccgtctatgcctacggccagtccgtgtccgtggtcgctctgccaatcggcatcgacacggcaaaggtggaggcggacgccttcactgatgaaataacggaaaaagtgcgggcgattcggcagctgtaccccgacaagaagatcattgtgggccgagaccggctggattcggtccggggcgtggtgcagaagttgtatgcgttcgacgtgtttctcaaacggtaccccgagtggcgggatcgcgtggtactggtgcaggtgacgtcacataccgccacaggcacgcgcaaagtcgaaaagaaggtggccgagctggtgtcatccataaacggcagatatggtgccatccacttttcgccagtgcatcattacaccaagcacattgctcgcgaggagtatctggctctgttgcgagtggcggacctttgtctcatcacttcggttcgtgatggcatgaacaccactgccttggagtttattgtgtgccaaaacggcaacaactctccgttgattctgtccgagttcacgggatcggccggaaacctgcctggcgcgattctggtgaacccctgggacgctgttggggttgcagagcagatcaaccggacattccgaatgggccaggacgagaagctggcgatcgagcaaccgctgtaccagcgggtgaccgccaacacggtgcagcactgggtgaaccggtttgtatcgcaggtgatcagcaacaccttccgaaccgaccagtctcatctgacgccgattctcgacaatcacaaacttgtggagcggttcaagatggccaaaaagcgagtgtttttgtttgattatgacggcactctcacgcccattgtgacggaccctgccgctgccactccttcagacggtctgaagcgggaccttcgagcgctggccaaggacccccggaacgccatatggataatttccggccgtgactccacgttcctggacaagtggctcggcgatattgctgaacttggcatgtctgccgagcatggctgtttcatgaagaatccaggcaccaccgactgggagaacttggcagccaactttgacatgagctggcagaaggacgtgaacgacattttccaatactacacggagcggacacaggggtcgcacattgaacgcaagcgtgtggctctgacatggcactaccgacgagcagaccctgaatttgggctgtttcaggcccgggagtgccgggcacatctggagcaggcggtggtgcccaagtgggacgtggaggtgatgagcggcaaggccaatcttgaagtacggcccaagtcggtcaacaagggtgagattgtcaaacggctcatttctgagtactcatcagagggccggcccccgcagtttgtcctgtgtatgggtgacgaccagacggacgaggacatgttcaaggctctcaaggatgtacctgatttggacagcgagagcattttccccgtaatgattgggcctccggagaagaagaccaccgccagctggcacctgctggagcccaagggcgtcctggagacgttgaatgagctggccaagttggagggcgagagtaagatgtag

SEQ ID NO: 162 - protein, 800 aa, Yarrowia lipolytica
MLPEIITPTAARALNVPISGRVINCVTTLPYEIYREGATYKIRPRRGNSALYSALDYMQSGDGDTTWTSSLVAWTGEIALPAATSLPDLELYQKLTEQDKHMLERELTEAQGGTPTHPIWTDSGDTVSTGYNEQLSPTRRYAENILWPILHYIQGEPTDGRDEKKWWSDYEDLNRKYCDKVLDIYNEGDVIWIHDYYLFLLPKMIREKLPDARIGFFMHAPFPSSEYFRCLAKRQELLQGVLASNLISTQSEAHKRHFMSACSRIVGAETATPTSVYAYGQSVSVVALPIGIDTAKVEADAFTDEITEKVRAIRQLYPDKKIIVGRDRLDSVRGVVQKLYAFDVFLKRYPEWRDRVVLVQVTSHTATGTRKVEKKVAELVSSINGRYGAIHFSPVHHYTKHIAREEYLALLRVADLCLITSVRDGMNTTALEFIVCQNGNNSPLILSEFTGSAGNLPGAILVNPWDAVGVAEQINRTFRMGQDEKLAIEQPLYQRVTANTVQHWVNRFVSQVISNTFRTDQSHLTPILDNHKLVERFKMAKKRVFLFDYDGTLTPIVTDPAAATPSDGLKRDLRALAKDPRNAIWIISGRDSTFLDKWLGDIAELGMSAEHGCFMKNPGTTDWENLAANFDMSWQKDVNDIFQYYTERTQGSHIERKRVALTWHYRRADPEFGLFQARECRAHLEQAVVPKWDVEVMSGKANLEVRPKSVNKGEIVKRLISEYSSEGRPPQFVLCMGDDQTDEDMFKALKDVPDLDSESIFPVMIGPPEKKTTASWHLLEPKGVLETLNELAKLEGESKM

SEQ ID NO: 163 - DNA, 2604 bp, Arabidopsis lyrata
  Arabidopsis lyrata subsp. lyrata
atggtgtcaagatcttgtgcaaattttatagatttagcatcttgggacttattggactttcctcaaactcaaagagctcttcctcgtgtcatgactgttcctggtatcatctctgagttggatggaggctacagtgatggatcctctgatgttaattcctcaagcagctcccgtgagcggaagattatagtggctaatatgttaccattacaagctaagagagatacagagagtggtcaatggtgttttagttgggatgaagattctcttctcttgcaactcagagatgggttttcttcggatacggagtttgtttatataggatcacttaatgctgatattggtacgagtgaacaagaagaagtttctcacaagcttttgttggatttcaattgtgttcctacgtttttacccaaggagatgcaagaaaagttctatcttggtttctgtaaacaccatttgtggccgctctttcactatatgcttcctatgttccctgaccacggtgatcgttttgaccggcgtctttggcaagcgtatgtctctgcaaacaagatattttcagatagggtgatggaagtcatcaaccctgaggaagattatgtttggattcatgattatcatctgatggttcttcccacattcttgaggaaacggtttaacaggatcaagcttggatttttccttcacagtccatttccatcgtcagaaatctaccgcactttgccagtgagggatgatcttctgagaggattgttgaactgtgatctcattggtttccacacatttgattatgcacgtcattttttgtcatgctgcagtagaatgcttggccttgattatgaatctaagcgtgggcacattgggcttgattactttggtcgaacggtgtttattaagatccttcctgttggcatccatatggggaggctggaatcggttttgaatcttccgtcgactgcagcgaaaatgaaagagatacaagaacagttcaaggggaaaaagttgattctcggtgtcgacgacatggacatctttaaaggcataagcctcaaacttatagccatggaacgtctctttgagacatattggcatatgcgaggaaaacttgtcctgattcagatagtgaacccagctcgggccacaggtaaggatgtggaagaagcaaagagggagacatattcaactgtaaaaaggattaacgagcgctatggttctgctggttatcagccagtgatcttgattgatcgtcttgttccacgttatgagaagactgcctattatgcaatggcagactgctgcctggtgaatgcagtaagagatggcatgaacttagttccatataaatatatcatttgcaggcaagggaccccaggaatggataaggccatgggcattagccatgactcaccccggacgagcatgcttgtcgtctctgagtttatcggctgctcgccttcattgagtggtgcgatcagggtgaacccatgggatgtagatgctgtttcagaagcggtaaacttagccctcaccatgggtgaaactgaaaagcgattaaggcacgagaaacactatcactatgtcagtactcatgatgtgggttactgggcaaagagctttatgcaggatctggagagggcatgccgggaacattataataaacgttgttggggtattggttttggcttgagtttcagagttttgtcactatctccgagttttaggaagctatctatcgatcacattgtctcgacgtacagaactacacagagaagggcaatatttttggattatgacggcactctcgttcctgagagctccattatcaaaacccctaatgctgaagtcctgtctgttctgaaatctctgtgtggagatcctaaaaacactgtgtttgtcgtcagtggaagaggatgggagtctctgagcgactggctatctccatgtgaaaatcttggaatcgcagctgaacacggatacttcataaggtggagtagcaagagagagtgggagacttgttactcgtcggctgaggcggaatggaagacgatggtagaaccggtaatgagatcatacatggacgcaacggatggttctactatagagttcaaagagagtgctttggtttggcatcatcaagaagcggatccggactttggagcctgtcaagcaaaggagcttctggatcatctagagagtgtacttgcaaatgagcctgttgtcgtcaagagaggccaacacattgtagaggtcaaaccacagggagtgagcaaaggtctagccgtggaaaaggtgatacaccgaatggtagaggatggaaacccaccggacatggtaatgtgtataggagatgacagatcagacgaggacatgtttgagagcatattgagcacagtgacaaacccggacctcccaatgccaccagagatctttgcttgcacggtgggaagaaaaccaagcaaagccaagtacttcttagatgatgtctcagatgtattgaagctcctaggaggattagctgctgcctcgagcagcaggaagccagaggatcaacaacaatcctcctcattgcacacgcaagtggcgtttgagagcatcatctga

SEQ ID NO: 164 - protein, 867 aa, Arabidopsis lyrata
  Arabidopsis lyrata subsp. lyrata
MVSRSCANFIDLASWDLLDFPQTQRALPRVMTVPGIISELDGGYSDGSSDVNSSSSSRERKIIVANMLPLQAKRDTESGQWCFSWDEDSLLLQLRDGFSSDTEFVYIGSLNADIGTSEQEEVSHKLLLDFNCVPTFLPKEMQEKFYLGFCKHHLWPLFHYMLPMFPDHGDRFDRRLWQAYVSANKIFSDRVMEVINPEEDYVWIHDYHLMVLPTFLRKRFNRIKLGFFLHSPFPSSEIYRTLPVRDDLLRGLLNCDLIGFHTFDYARHFLSCCSRMLGLDYESKRGHIGLDYFGRTVFIKILPVGIHMGRLESVLNLPSTAAKMKEIQEQFKGKKLILGVDDMDIFKGISLKLIAMERLFETYWHMRGKLVLIQIVNPARATGKDVEEAKRETYSTVKRINERYGSAGYQPVILIDRLVPRYEKTAYYAMADCCLVNAVRDGMNLVPYKYIICRQGTPGMDKAMGISHDSPRTSMLVVSEFIGCSPSLSGAIRVNPWDVDAVSEAVNLALTMGETEKRLRHEKHYHYVSTHDVGYWAKSFMQDLERACREHYNKRCWGIGFGLSFRVLSLSPSFRKLSIDHIVSTYRTTQRRAIFLDYDGTLVPESSIIKTPNAEVLSVLKSLCGDPKNTVFVVSGRGWESLSDWLSPCENLGIAAEHGYFIRWSSKREWETCYSSAEAEWKTMVEPVMRSYMDATDGSTIEFKESALVWHHQEADPDFGACQAKELLDHLESVLANEPVVVKRGQHIVEVKPQGVSKGLAVEKVIHRMVEDGNPPDMVMCIGDDRSDEDMFESILSTVTNPDLPMPPEIFACTVGRKPSKAKYFLDDVSDVLKLLGGLAAASSSRKPEDQQQSSSLHTQVAFESII

SEQ ID NO: 165 - DNA, 2571 bp, Arabidopsis lyrata
  Arabidopsis lyrata subsp. lyrata
atggtgtcaagatcttgtgctaattttctagacatatcatcttgggaccttttagattttcctcaaactccaagaactcttccacgcttcatgactgtccccggaatcatcaccgacgtagacggaggagatataacctccgaagtaacttcatcctccggtggctcacgtgagaggaagatcattgttgctaatatgttaccacttcaatccaaaagagatacagaaactggtaaatggtgttttcattgggacgaagactctctccagttacaacttagagatgggttttcttcagaaacagagtttctctacgttggatcacttaacgttgatatcgaaacgagtgagcaagaagaagtttcacaaaggcttttagaggaatttaactgcgttgcaacgtttttgtctcaagagttgcaagaaatgttctatcttggtttttgtaaacatcagttatggccactctttcattacatgcttccaatgtttcctgatcatggagatcgtttcgaccgacgtttatggcaagcttatgtgtctgctaacaagatattttcagacagagttatggaagttatcaaccctgaggatgattatgtttggattcaagattatcatctcatggttcttcctactttcttgaggaaacgttttaataggattaaactcgggtttttccttcatagtccgtttccttcttcagagatttaccgcacattgcctgttcgtgacgagattctgagaggtttgttgaattgtgatcttattggattccatacgtttgattacgcgcggcatttcttgtcatgttgtagtagaatgcttggtcttgattatgagtctaagcgcggtcatatagggcttgattactttggtaggactgtgtatatcaaaattcttcctgttggtgttcatatgggtagattggaatctgttttgaatcttgattctactgcggcgaaaactaaagagattcaagaacagtttaaagggaaaaaactggttcttggtatcgatgatatggatatatttaaaggtataagcttaaagcttatagcaatggaacatctcttcgagacttattggcatttgagagggaaagttgttcttgttcagatagtgaatcctgcaagatcctctggtaaagatgtggaagaagcgaaaagagagacgtatgtgactgcgaaaaggatcaatgagcgttacggtacttctgattataagccgatagtcttgatcgatcgtcttgttccacgttctgagaaaaccgcgtattatgctgcagcagattgttgcttggtgaatgcagtgagagatggtatgaacttagttccttataagtatatagtctgcagagaagggactcgaaacaaggcccttgatgattcatcaccccgcacaagcacgcttgttgtgtctgagtttattggatgctcgccttctttgagtggtgccattagggtgaatccatgggatgtggatgctgtggctgaggcggtaaactcggctctgaaaatgagtgagacagagaagcaactacggcatgagaaacattaccactatattagcactcatgatgtgggttactgggcaaagagctttatgcaggatcttgagagagcttgccgggatcattatagtaaacgttgttgggggattggatttggattggggttcagagttttgtcgctctctccaagtttcaggaagctatccgtggaaaacattgtcccggtttatagaaaaacacagagaagggcgatatttcttgattatgatggcactcttgttcctgaaagctccattgttcaagatccaagcgccgaggttgtctctgttctgaaagctctctgtgaagatcccaataacacagtgtttattgttagtggaagaggaaaagagtctctgagcaattggctatctccttgtgaaaatcttggaatagcggctgaacatggatacttcataaggtggaatagcaaagatgagtgggagacttgttactcgccttcggatacagagtggaggtcattggtggaaccggttatgagatcgtatatggaggcaacggatggaacgagtatagagtttaaagaaagtgctttggtgtggcaccatcaagacgcagatccggactttggatcatgtcaagctaaggagatgcttgatcatctagagagtgttctcgccaatgagcctgtcgttgtaaagagaggtcaacacatcgttgaagtcaaaccacagggtgtaagcaaaggtttagctgcggaaaaggtaatccgaggaatggtagaacgcggggagccaccggaaatggtgatgtgcataggagacgatagatcagacgaagacatgtttgagagcatattaagcacagtgacaaatccagagcttcttgttcagccagaggtttttgcatgcacggttggaagaaaaccaagcaaagctaaatacttcttagacgatgaagccgacgtgcttaagctcctaagaggccttggagactcatcatcaagcttaaaacccacatcttctcacacacaagtttcatttgaaagcatcgtttaa

SEQ ID NO: 166 - protein, 856 aa, Arabidopsis lyrata
  Arabidopsis lyrata subsp. lyrata
MVSRSCANFLDISSWDLLDFPQTPRTLPRFMTVPGIITDVDGGDITSEVTSSSGGSRERKIIVANMLPLQSKRDTETGKWCFHWDEDSLQLQLRDGFSSETEFLYVGSLNVDIETSEQEEVSQRLLEEFNCVATFLSQELQEMFYLGFCKHQLWPLFHYMLPMFPDHGDRFDRRLWQAYVSANKIFSDRVMEVINPEDDYVWIQDYHLMVLPTFLRKRFNRIKLGFFLHSPFPSSEIYRTLPVRDEILRGLLNCDLIGFHTFDYARHFLSCCSRMLGLDYESKRGHIGLDYFGRTVYIKILPVGVHMGRLESVLNLDSTAAKTKEIQEQFKGKKLVLGIDDMDIFKGISLKLIAMEHLFETYWHLRGKVVLVQIVNPARSSGKDVEEAKRETYVTAKRINERYGTSDYKPIVLIDRLVPRSEKTAYYAAADCCLVNAVRDGMNLVPYKYIVCREGTRNKALDDSSPRTSTLVVSEFIGCSPSLSGAIRVNPWDVDAVAEAVNSALKMSETEKQLRHEKHYHYISTHDVGYWAKSFMQDLERACRDHYSKRCWGIGFGLGFRVLSLSPSFRKLSVENIVPVYRKTQRRAIFLDYDGTLVPESSIVQDPSAEVVSVLKALCEDPNNTVFIVSGRGKESLSNWLSPCENLGIAAEHGYFIRWNSKDEWETCYSPSDTEWRSLVEPVMRSYMEATDGTSIEFKESALVWHHQDADPDFGSCQAKEMLDHLESVLANEPVVVKRGQHIVEVKPQGVSKGLAAEKVIRGMVERGEPPEMVMCIGDDRSDEDMFESILSTVTNPELLVQPEVFACTVGRKPSKAKYFLDDEADVLKLLRGLGDSSSSLKPTSSHTQVSFESIV

SEQ ID NO: 167 - DNA, 2562 bp, Arabidopsis thaliana
tataataggcaacgactacttgtagtggctaacaggctcccagtttctgccgtgagaagaggtgaagattcatggtctcttgagatcagtgctggtggtctagtcagtgctctcttaggtgtaaaggaatttgaggccagatggataggatgggctggagttaatgtgcctgatgaggttggacagaaggcacttagcaaagctttggctgagaagaggtgtattcccgtgttccttgatgaagagattgttcatcagtactataatggttactgcaacaatattctgtggcctctgtttcactaccttggacttccgcaagaagatcggcttgccacaaccagaagctttcagtcccaatttgctgcatacaagaaggcaaaccaaatgttcgctgatgttgtaaatgagcactatgaagagggagatgtcgtctggtgccatgactatcatcttatgttccttcctaaatgccttaaggagtacaacagtaagatgaaagttggatggtttctccatacaccattcccttcgtctgagatacacaggacacttccatcacgatcagagctccttcgctcagttcttgctgctgatttagttggcttccatacatatgactatgcaaggcactttgtgagtgcgtgcactcgtattcttggacttgaaggaacacctgagggagttgaggatcaaggcaggctcactcgtgtagctgcttttccaattggcatagattctgatcggtttatacgagcacttgaggtccccgaagtcatacaacacatgaaggaattgaaagaaagatttgctggcagaaaggtgatgttaggtgttgatcgtcttgacatgatcaaagggattccacaaaagattctggcattcgaaaaatttctcgaggaaaatgcaaactggcgtgataaagtggtcttattgcaaattgcggtgccaacaagaactgacgttcctgagtatcaaaaactcacaagccaagttcatgaaattgttggacgcattaatggtcgttttgggacactgactgcagttccaatacatcatctggatcggtctctggactttcatgctttatgtgcactttatgccgtcacagatgttgcgcttgtaacatctttgagagatgggatgaatcttgtcagttatgagtttgttgcttgccaagaggccaaaaagggcgtcctcattctcagtggatttgcaggtgctgcacagtctctgggtgctggagctattcttgtgaatccttggaacatcacagaagttgctgcctccattggacaagccctaaacatgacagctgaagaaagagagaaaagacatcgccataattttcatcatgtcaaaactcacactgctcaagaatgggctgaaacttttgtcagtgaactaaatgacactgtaattgaggcgcaactacgaattagtaaagtcccaccagagcttccacagcatgatgcaattcaacggtattcaaagtccaacaacaggcttctaatcctgggtttcaatgcaacattgactgaaccagtggataatcaagggagaagaggtgatcaaataaaggagatggatcttaatctacaccctgagcttaaagggcccttaaaggcattatgcagtgatccaagtacaaccatagttgttctgagcggaagcagcagaagtgttttggacaaaaactttggagagtatgacatgtggctggcagcagaaaatgggatgttcctaaggcttacgaatggagagtggatgactacaatgccagaacacttgaacatggaatgggttgatagcgtaaagcatgttttcaagtacttcactgagagaactcccaggtcacactttgaaactcgcgatacttcgcttatttggaactacaaatatgcagatatcgaattcgggagacttcaagcaagagatttgttacaacacttatggacaggtccaatctctaatgcatcagttgatgttgtccaaggaagccgctctgtggaagtccgtgcagttggtgtcacaaagggagctgcaattgatcgtattctaggagagatagtgcatagcaagtcgatgactacaccaatcgattacgtcttgtgcattggtcatttcttggggaaggacgaagatgtttacactttcttcgaaccagaacttccatccgacatgccagccattgcacgatccagaccatcatctgacagtggagccaagtcatcatcaggagaccgaagaccaccttcaaagtcgacacataacaacaacaaaagtggatcaaaatcctcatcatcctctaactctaacaacaacaacaagtcctcacagagatctcttcagtcagagagaaaaagtggatccaaccatagcttaggaaactcaagacgtccttcaccagagaagatctcatggaatgtgcttgacctcaaaggagagaactacttctcttgcgctgtgggtcgtactcgcaccaatgctagatatctccttggctcacctgacgacgtcgtttgcttccttgagaagctcgctgacaccacttcctcacct

SEQ ID NO: 168 - protein, 854 aa, Arabidopsis thaliana
YNRQRLLVVANRLPVSAVRRGEDSWSLEISAGGLVSALLGVKEFEARWIGWAGVNVPDEVGQKALSKALAEKRCIPVFLDEEIVHQYYNGYCNNILWPLFHYLGLPQEDRLATTRSFQSQFAAYKKANQMFADVVNEHYEEGDVVWCHDYHLMFLPKCLKEYNSKMKVGWFLHTPFPSSEIHRTLPSRSELLRSVLAADLVGFHTYDYARHFVSACTRILGLEGTPEGVEDQGRLTRVAAFPIGIDSDRFIRALEVPEVIQHMKELKERFAGRKVMLGVDRLDMIKGIPQKILAFEKFLEENANWRDKVVLLQIAVPTRTDVPEYQKLTSQVHEIVGRINGRFGTLTAVPIHHLDRSLDFHALCALYAVTDVALVTSLRDGMNLVSYEFVACQEAKKGVLILSGFAGAAQSLGAGAILVNPWNITEVAASIGQALNMTAEEREKRHRHNFHHVKTHTAQEWAETFVSELNDTVIEAQLRISKVPPELPQHDAIQRYSKSNNRLLILGFNATLTEPVDNQGRRGDQIKEMDLNLHPELKGPLKALCSDPSTTIVVLSGSSRSVLDKNFGEYDMWLAAENGMFLRLTNGEWMTTMPEHLNMEWVDSVKHVFKYFTERTPRSHFETRDTSLIWNYKYADIEFGRLQARDLLQHLWTGPISNASVDVVQGSRSVEVRAVGVTKGAAIDRILGEIVHSKSMTTPIDYVLCIGHFLGKDEDVYTFFEPELPSDMPAIARSRPSSDSGAKSSSGDRRPPSKSTHNNNKSGSKSSSSSNSNNNNKSSQRSLQSERKSGSNHSLGNSRRPSPEKISWNVLDLKGENYFSCAVGRTRTNARYLLGSPDDVVCFLEKLADTTSSP

SEQ ID NO: 169 - DNA, 2934 bp, Sorghum bicolor
atgagctctgacgccgcggggggacagcgcagcatcagcaactccacgaggggcgacgcggcggcggcgatgccaacctcatcgccctttgtcgtcggcgacagcagcggcggcgcgggctccccgatccgcgtcgaccgaatggtccgggagcacggccgccgctacgacatcttcgcgtcggacgcgatggataccgacggcgccgagccggcgtcggcttccgcggggcccttcgccgtggatggggtccagtcgcctggccgtgtgtcacccgccaacatggaggatgccggcggcgcggccgctgggcacgccgcgcgaccgccgctcgccggctcccgcagcggtttccgccgcctcggcctccgtggcatgaagcagcgcctcctcgtcgtggccaaccgcctccctgtttccgccaaccgccgcggcgaggaccactggtcgcttgagatcagcgccggcggcctcgtgagcgccctgcttggggtgaaggacgtcgacgcgaaatggattggctgggcgggcgtcaacgttccagacgaggttggccagcgagccctcaccaaagctcttgccgagaagagatgcataccagtgttcctggatgaggagattgtgcaccagtactacaatgggtattgcaacaacatcctgtggccgctgttccactacctaggactaccacaggaggacaggctggcaacaacgaggaactttgagtcacagttcgacgcgtacaagcgtgctaaccagatgtttgctgatgtcgtgtaccagcactaccaggagggggatgtaatctggtgccatgactaccacctcatgttcctgcccaagtgcctcaaggaccatgacatcaatatgaaagtcggttggttcctgcacacgccattcccatcatcagagatttaccgaacactgccatcccgcttggagctgcttcgctcggtgctgtgtgctgatttagtcggatttcatacttacgactatgcgaggcattttgtgagtgcttgcactagaatacttggacttgagggtacccctgagggtgtggaagatcaaggaagactaaccagggttgcagcgtttcctattgggatagactctgatcgtttcaagcgagcattggagcttccagcagtaaaaaggcacatcagtgaattgacacaacgttttgctggtcgaaaggtaatgcttggtgttgatcgacttgacatgattaagggaattccacaaaagattttggcctttgaaaagtttcttgaggaaaacccagactggaacgacaaagttgttctactgcagattgctgtgccaacaagaactgacgtccctgagtatcaaaagctaacaagccaagtgcatgaaattgttgggcgcataaacggtcgattcggaacgttgactgctgtccctattcatcatctggaccgatctcttgatttccatgctttgtgtgctctttatgcagtcactgatgttgctcttgtaacatcactgagagatgggatgaaccttgtgagctatgagtatgttgcatgccaagggtctaagaaaggagttttgatacttagtgagtttgctggggcagcacaatcacttggagctggcgccattctagtaaacccttggaatattacagaagttgcagactcaatacggcacgctttgacgatgccatccgatgagagagagaaacggcacaggcacaactatgctcatgtcacaactcacacggctcaagattgggctgaaacttttgtatttgagctaaatgacacggttgctgaagcactactgaggacaagacaagttcctcctggacttcctagtcaaacggcaatccagcaatatttgcgctctaaaaatcgtctgctcatattgggtttcaattcaacattgactgaaccagtcgaatcctctgggagaaggggtggtgaccaaatcaaggaaatggaactcaagttgcatcctgacttaaagggtcctctgagagccctctgtgaagatgagcgcactacagttattgttcttagtggcagtgacaggagtgttcttgatgaaaatttcggagaatttaaaatgtggttggcagcagagcatgggatgtttttacgcccgacttatggagaatggatgacaacaatgcctgagcatctgaacatggattgggttgacagcgtaaagcatgtttttgaatactttacagaaagaaccccaagatcccatttcgaacatcgtgaaacatcatttgtgtggaactacaagtatgctgatgttgaatttggaaggctacaagcaagagatatgctgcagcacttgtggacaggtccgatctcaaatgcagctgttgatgttgttcaagggagtcggtcagttgaagttcggtctgttggagttacaaagggtgctgcaattgatcgcattttaggggagatagttcacagcgaaaacatggttactccaattgactatgtcctgtgtatagggcatttccttgggaaggatgaggatatctatgtcttttttgatcccgagtacccttctgaatccaaaataaaaccagagggtggctcagcttcacttgaccggaggcccaacggaaggccaccatcgaacggcaggagcaactccaggaacccacagtccaggacacagaaggcgcagcaggctcaggctgcatccgagaggtcatcctcttcaagccacagcagcgcaagcagcaaccatgactggcgcgaagggtcctcggtccttgatctcaagggcgagaactacttctcctgcgccgttggaaggaaacggtccaacgcccgctacctgctgagttcgtcagaggaggttgtctccttcctcaaggagctggcaacagcaacagctggcttccaatccagctgtgctgattacatgttcctggataggcagtaa

SEQ ID NO: 170 - protein, 977 aa, Sorghum bicolor
MSSDAAGGQRSISNSTRGDAAAAMPTSSPFVVGDSSGGAGSPIRVDRMVREHGRRYDIFASDAMDTDGAEPASASAGPFAVDGVQSPGRVSPANMEDAGGAAAGHAARPPLAGSRSGFRRLGLRGMKQRLLVVANRLPVSANRRGEDHWSLEISAGGLVSALLGVKDVDAKWIGWAGVNVPDEVGQRALTKALAEKRCIPVFLDEEIVHQYYNGYCNNILWPLFHYLGLPQEDRLATTRNFESQFDAYKRANQMFADVVYQHYQEGDVIWCHDYHLMFLPKCLKDHDINMKVGWFLHTPFPSSEIYRTLPSRLELLRSVLCADLVGFHTYDYARHFVSACTRILGLEGTPEGVEDQGRLTRVAAFPIGIDSDRFKRALELPAVKRHISELTQRFAGRKVMLGVDRLDMIKGIPQKILAFEKFLEENPDWNDKVVLLQIAVPTRTDVPEYQKLTSQVHEIVGRINGRFGTLTAVPIHHLDRSLDFHALCALYAVTDVALVTSLRDGMNLVSYEYVACQGSKKGVLILSEFAGAAQSLGAGAILVNPWNITEVADSIRHALTMPSDEREKRHRHNYAHVTTHTAQDWAETFVFELNDTVAEALLRTRQVPPGLPSQTAIQQYLRSKNRLLILGFNSTLTEPVESSGRRGGDQIKEMELKLHPDLKGPLRALCEDERTTVIVLSGSDRSVLDENFGEFKMWLAAEHGMFLRPTYGEWMTTMPEHLNMDWVDSVKHVFEYFTERTPRSHFEHRETSFVWNYKYADVEFGRLQARDMLQHLWTGPISNAAVDVVQGSRSVEVRSVGVTKGAAIDRILGEIVHSENMVTPIDYVLCIGHFLGKDEDIYVFFDPEYPSESKIKPEGGSASLDRRPNGRPPSNGRSNSRNPQSRTQKAQQAQAASERSSSSSHSSASSNHDWREGSSVLDLKGENYFSCAVGRKRSNARYLLSSSEEVVSFLKELATATAGFQSSCADYMFLDRQ

SEQ ID NO: 171 - DNA, 2781 bp, Solanum lycopersicum
atgccagggaacaagtataccggcaaccaagcggttgctagcactcgattggagaggctattgagagaaagagagcttaggaaaagtagcaaagtttctcactttccaaatgaatctactgataacaataggggaaacgagctctctgaccatgattttcgccaaggagaagctgataatggaggagtttcatatgtcgaacagtacctcgaaggagctgcactagcatataatgaaggatgggagcggcctgatggaaagcccaccagacaacgactcttggttgtggcaaacaggttacctgtctctgcagtaaggagaggcgaggaatcctggtctctagagataagtggtggaggtcttgttagtgctcttcttggtgtgaaggagtttgaggctagatggattggttgggcaggtgtgaatgtgccagatgaggctgggcagagggcacttactaaggcactggcagaaaagaggtgtatccctgtattcctggatgaagaaattgttcatcagtattacaacggttactgcaacaatatattgtggcctcttttccattatcttggacttccgcaagaagaccgccttgcgactaccagaagtttccagtctcagtttgctgcttataagaaagcaaatcaaatgtttgctgatgttgtgaatgaacattacgaagaaggtgatgtggtatggtgtcatgactaccatctcatgttcctgccaaaatgtctcaaggattacaacagccaaatgaaagtcggttggtttctacacacaccctttccatcctcggaaatacacaggacactgccgtctagatcagagctgctccgagcagttcttgctgctgacttggttggttttcatacctatgactatgcaaggcattttgttagtgcatgtactcgtatcctgggacttgaaggaacacctgaaggagtagaagatcaaggtagactgacccgcgttgctgcgtttcctattggtatagattcagaacgatttattcgagcacttgaagttactcaagttcaggaacacataaaagaactaaaagagagatttgctgggagaaaggttatgctaggagttgatcgccttgatatgattaaaggaattccccaaaagatcctggcatttgagaagttccttgaagaaaatccgtactggcgtgataaagtggttttgcttcaaattgctgtgccaacaagaacagatgttcctgaataccaaaaacttaccagtcaagttcatgagattgttggacgcatcaatggtcggtttggaactttgactgcagtgcctattcatcatctggaccgttctcttgactttcatgcattatgtgcactgtatgctgtaactgatgtagcgttggttacctctttaagagatggcatgaacctcgtcagctatgaatttgtagcctgccaagagttgaaaaaaggggtccttattctcagcgaatttgctggtgctgcacaatcgttaggtgctggagcaattctggtgaatccatggaatataacagaggttgctgcttcgattgggcaagctttaaatatgtcagctgaagaaagagaaaaacgccacaggcataactttctgcatgtgactacgcatactgctcaagaatgggctgagacttttgtgagtgaactaaatgatactgttattgaagctcaacagaggataagaaaagttccgccccggcttaacatcagtgatgcaattgagcgctattcgttttccaataatcgactactaatattgggtttcaattctacactgacagaatcggtggatacccctggaagaagaggtggagatcaaatcaaagaaatggaactgaaattgcatcctgagttgaaagaatcattgctcgcgatttgtaacgacccaaagacaacagtcgttgtcctcagtggaagtgatagaaacgtcttagatgataacttcagcgagtacaacatgtggttagcagcagaaaatggaatgtttttacgatctacaaacggtgtatggatgacaactatgccagaacacctaaacatggactgggttgatagtgttaagcacgttttcgagtacttcactgaaaggacaccgagatctcactttgaacaacgtgaaacttcacttgtttggaattacaagtatgcagatgttgaatttggaagattgcaagctagagacatgcttcagcatctctggacaggtccaatatcaaatgcatctgttgatgttgtacaaggactccgctccgttgaggttcgagcagttggtgttacaaagggagcagcaatagatcgtatactgggggagatcgtacacagtaaagccatcgcaacaccaattgattacgttttatgcatagggcattttctggggaaggatgaggatgtatatacattttttgagccagagcttccttctgactgcatcggtatgccaagaagtaaggtcagtgatgcaccaaaggtgcccggggaaaggcgatcagttccaaaactcccttctagtcgaactagctcaaagtcatctcagaataggaacagaccagtttcaaactcggataagaagacttccaatgggcgacggccctcacctgaaaatgtgtcatggaatgtgctggatctgaagaaggagaattacttctcttgtgcagttggaaggactcgtacaaacgctcggtatctgctcagtacgccagacgacgttgttgcttttctaagggaactagctgaagcacctatttcaaatgggacatcatga

SEQ ID NO: 172 - protein, 926 aa, Solanum lycopersicum
MPGNKYTGNQAVASTRLERLLRERELRKSSKVSHFPNESTDNNRGNELSDHDFRQGEADNGGVSYVEQYLEGAALAYNEGWERPDGKPTRQRLLVVANRLPVSAVRRGEESWSLEISGGGLVSALLGVKEFEARWIGWAGVNVPDEAGQRALTKALAEKRCIPVFLDEEIVHQYYNGYCNNILWPLFHYLGLPQEDRLATTRSFQSQFAAYKKANQMFADVVNEHYEEGDVVWCHDYHLMFLPKCLKDYNSQMKVGWFLHTPFPSSEIHRTLPSRSELLRAVLAADLVGFHTYDYARHFVSACTRILGLEGTPEGVEDQGRLTRVAAFPIGIDSERFIRALEVTQVQEHIKELKERFAGRKVMLGVDRLDMIKGIPQKILAFEKFLEENPYWRDKVVLLQIAVPTRTDVPEYQKLTSQVHEIVGRINGRFGTLTAVPIHHLDRSLDFHALCALYAVTDVALVTSLRDGMNLVSYEFVACQELKKGVLILSEFAGAAQSLGAGAILVNPWNITEVAASIGQALNMSAEEREKRHRHNFLHVTTHTAQEWAETFVSELNDTVIEAQQRIRKVPPRLNISDAIERYSFSNNRLLILGFNSTLTESVDTPGRRGGDQIKEMELKLHPELKESLLAICNDPKTTVVVLSGSDRNVLDDNFSEYNMWLAAENGMFLRSTNGVWMTTMPEHLNMDWVDSVKHVFEYFTERTPRSHFEQRETSLVWNYKYADVEFGRLQARDMLQHLWTGPISNASVDVVQGLRSVEVRAVGVTKGAAIDRILGEIVHSKAIATPIDYVLCIGHFLGKDEDVYTFFEPELPSDCIGMPRSKVSDAPKVPGERRSVPKLPSSRTSSKSSQNRNRPVSNSDKKTSNGRRPSPENVSWNVLDLKKENYFSCAVGRTRTNARYLLSTPDDVVAFLRELAEAPISNGTS

SEQ ID NO: 173 - DNA, 2580 bp, Triticum aestivum
atgaagcagcgcctcctcgtcgtggccaaccgcctccccgtctccgccaatcgccgcggcgaggatcagtggtccctggagatcagcgccggtggcctcgtcagcgcgctcctcggtgtgaaagatgtcgacgcgaagtggatcggctgggccggtgtgaatgtccccgacgaggtcggccagcaggctctcaccaatgcactcgccgagaagagatgcataccagtcttcctggacgaggagatcgtgcaccagtactacaacggctactgcaacaacatactgtggccgctcttccactacctcgggctgccgcaggaggacaggctggcaaccacccggaacttcgagtcgcagttcgacgcgtacaagcgggccaaccagatgtttgctgatgtcgtctaccagcactaccaggaaggggatgtgatctggtgccatgactaccacctcatgttcctgcccaggtgcctcaaggagcatgacatcaacatgaaggtcgggtggttcctgcacacgcccttcccttcctcggagatttaccgcactctgccatcacgctcggagctgcttcgctccgtgctctgcgctgatttagtcggatttcatacatacgactatgcaaggcatttcgtgagcgcatgtaccagaatactcggactcgagggtacccctgaaggtgtggaggaccagggaaagttaacgcgggttgcagcgtttcctattgggatagactctgatcgtttcaaaagggcgttggacattgacgcagcaaaaagacatgtcaatgaactgaaacagcgatttgcgggacggaaggtaatgcttggtgttgatcgacttgacatgatcaaaggaattccccaaaagattttggcctttgaaaagtttcttgaggaaaaccctgaatggattgataaagtggttctacttcaaattgctgtgccaactagaactgacgtccctgagtatcagaagcttacaagccaagtgcatgaaattgttgggcgcataaatggacgatttggaacattgtctgctgttcctattcatcatctggatcgatctcttgatttccatgccttgtgtgctctttatgcagtcactgatgtggctcttgtaacatcactgagggatggcatgaatcttgtaagctacgaatatgttgcatgccagggatcaaaaaaaggagttctgatattgagtgagtttgccggtgcagcacaatcgcttggtgctggtgccattcttgtaaatccctggaatattacagaagttgcagactcaataaaacatgctttgacaatgacatctgatgagagagagaagcggcacaggcataactacgcgcatgtaacaactcataccgcccaagattgggctgaaacttttgtatgtgagctaaacgatacagttgctgaagctctgatgagaacaagacaagttccccctgaccttcctagtcgaacggccatccagcaatatctgcagtcaaaaaaccgtttgctcatattgggtttcaattcaacattgaccgagccagttgaatcctctgggagacggggcggtgatcaagtcaaggagatggaactcaagttgcatcctgacttaaagggtcctttgagagccctctgcgaggacgagagcactacggttatcgttctcagcggaagcgacaggagtgttcttgatgaaaatttcggagaatttaacttgtggctggcagcagagcatgggatgttcttacgcccaactgatggagaatggatgacaacaatgcctgagcatctgaacatggattgggtcgacagtgcaaagcatgtttttgagtacttcacagaaagaaccccaagatctcattttgaacatcgtgaaacatcatttgtgtggaattacaagtatgccgatgttgagtttgggaggctccaagcaagagatatgctgcagcacttgtggaccggtccaatctcaaatgcagctgtggatgttgttcaagggagccgttcagttgaagttcgctctgttggagttacaaagggtgctgcaattgatcgtattctaggagagatagttcacagcaaaagcatggttactccgattgactatgtgctatgcataggccacttcctaggaaaggacgaagacatctatgtgttttttgaccctgaatacccttctgagccaaaagtgaaaccggacggtgcgtcggtatccgtcgacaggaggcagaacgggcggccatcaaacggccggagcaactcgaggaactcgcaggcgaggacacaaaagcctcaggtcgcgccgccgcctccggagaggtcatcgtcgtcatccgaccacagcaccgcaaacaacaacagccaccacgactggcgcgaagggtcgtcggtcctcgacctcaacggcgacaactacttctcctgcgcggtcgggaggaagcgctccaacgcccgttacctgctcaactcgtcggaggacgtcgtctcattccttaaggagatggcggagtcgacgacgccccgcgccggtggcctcccgcccggcgctgccgcggactacatgttcttggataggcagtag

SEQ ID NO: 174 - protein, 859 aa, Triticum aestivum
MKQRLLVVANRLPVSANRRGEDQWSLEISAGGLVSALLGVKDVDAKWIGWAGVNVPDEVGQQALTNALAEKRCIPVFLDEEIVHQYYNGYCNNILWPLFHYLGLPQEDRLATTRNFESQFDAYKRANQMFADVVYQHYQEGDVIWCHDYHLMFLPRCLKEHDINMKVGWFLHTPFPSSEIYRTLPSRSELLRSVLCADLVGFHTYDYARHFVSACTRILGLEGTPEGVEDQGKLTRVAAFPIGIDSDRFKRALDIDAAKRHVNELKQRFAGRKVMLGVDRLDMIKGIPQKILAFEKFLEENPEWIDKVVLLQIAVPTRTDVPEYQKLTSQVHEIVGRINGRFGTLSAVPIHHLDRSLDFHALCALYAVTDVALVTSLRDGMNLVSYEYVACQGSKKGVLILSEFAGAAQSLGAGAILVNPWNITEVADSIKHALTMTSDEREKRHRHNYAHVTTHTAQDWAETFVCELNDTVAEALMRTRQVPPDLPSRTAIQQYLQSKNRLLILGFNSTLTEPVESSGRRGGDQVKEMELKLHPDLKGPLRALCEDESTTVIVLSGSDRSVLDENFGEFNLWLAAEHGMFLRPTDGEWMTTMPEHLNMDWVDSAKHVFEYFTERTPRSHFEHRETSFVWNYKYADVEFGRLQARDMLQHLWTGPISNAAVDVVQGSRSVEVRSVGVTKGAAIDRILGEIVHSKSMVTPIDYVLCIGHFLGKDEDIYVFFDPEYPSEPKVKPDGASVSVDRRQNGRPSNGRSNSRNSQARTQKPQVAPPPPERSSSSSDHSTANNNSHHDWREGSSVLDLNGDNYFSCAVGRKRSNARYLLNSSEDVVSFLKEMAESTTPRAGGLPPGAAADYMFLDRQ

SEQ ID NO: 175 - DNA, 2613 bp, Zostera marina
atgatgtcaagatcgtacacaaatcttctggatctagcgtcggggaacttcccggtgattagtggcggtggacgggatggtcgtagcggtgggatgcgacgaatgccgcgagtgatgactgttccgtcaaacatagcggagcttgaggatgaacaagcgagtagtgttgcttcggatgtgcagtcttctattattcaagatcggttaataatagtcggtaaccaacttcctgttgtcgccaaacgccgatcagataacgccggttgggatttctcttgggatgatgagtctctccttcttcaactcaaagacggcttaccggatgatatggaagtcttatacgtcggttgcctccgtgtcatcgtcgatcctgaagaacaagacgacgtctcccaaacactacttgagaagttcaaatgcgtgccggcatttctaactgaggaaatccttgaaaagtactatcacggcttctgcaagaagctactgtggccgttgtttcattacatgttgccattgacgaaagatcatggtggaaggtttgataggtctctttgggaggcttatgttgcggtgaacaagatattttcacagaaggttgttgaaattattagtccagaagatgactatgtttggattcatgattaccatctcatggttcttccaactttgcttagacgaaggtttattcggcttcgaatgggtttttttcttcacagcccgttcccatcatcagagatttatagaacacttcccgtacgtgaagagattctaaattcgctactatgttccgatttgattggattccacacatttgattatgcacggcatttcttgtcatgttgtagtagaatgatggggttggaataccaatcaaaacgagggtatatcagtttagattactttggccgaacggttggaatcaagatcatgcccgccagtattcatttgggccagttggagtctatgttgaagactgtgtataaggagtcgaagattgaggaacttgagaggcagtttcaggggaagactgtcattttaggagttgatgatatggatatctttaaggggattaatttgaaattattggccttcgaacagatgctgaagcttcgtcctaattggcagggaagggctgtgctggttcagatcgccaatcctgcaagagggagaggaaagggacttgaaagtgtggaggttgagattcgagatatttgtgaaaggatcaatcaacagtttggacgtgttggttacaaacctgtagtgtacatcaatcgatctgtttcattgaaagaaaggattgcctattacacaatcgcagaatgtgttgttgtttccgcagtgagggatgggatgaatctaataccatatgagtacactgtctgtaagcaaggaatcgccgagcctgaatcagattcattatttgctgatccaaaaaaaagtatgttggtcgtgtcagaattcattggttgttctccttctttgagtggtgcaatcaagattaatccttggaacagcgaagcgactgcagaggctatgagtgatgcaatctcgatgcccgatggagagaagcaattgcgtcatgggaagcattatagatatgttcggactcatggtgtttcatattggtcaaaaagtttcatgcaggatatggagaggacatgcaaggatcattttaagaggagatgttggggtattggattcgggtttggttttagagttgttgccctcgatcctaatttcaaaaaactcaatgtggactccattgtgttttcatatgaaagggccaaaagtagggctatattattggattatgatggaacgatgattaatccattatctattaacaaaacaccgagcactgaagtgatctctattttgaacgctcttagtaaagacaaaaagaatgttgtttttatggtgagtggcaggggaagggagagtttagggagttggttttcttcatgcgagaagcttggaattgcagcagagcatggttttttcatgaggtgggggcgagatgatgaatggacgacttgggacaaaaataaagattttgggtggatgttgatggcggatcctgtaatgaaattatacacagaggctacagatggatcatatattgaagccaaagaaagtgccttggtttggcaccaccgagatgccgatcaaacttttggaacctctcaagcaaaagagatgttagaccatctcgaaaacgttttggctaacgaacctgttatcgcaaagcgtggccaattcattgttgaagttaagccacagggagttagcaaaggtttagtagcagataacattttatcaacaatggctaagagaaactgcccagcagattttgtattgtgtattggtgatgatagatcagatgaagacatgtttgaaaactttggtagcaagaatttggtatcctttaatgcacatatatattcctgcacggttgggcaaaaacctagcaaagccacttattatttagatgacactaatgatgttttggaaatgcttcgtgcccttgctgatgcctccgaagaagatgatgacgatgaagaggaaatcgaagatgattatgttgatgatgaatcggaagaaggttcaagttaa

SEQ ID NO: 176 - protein, 870 aa, Zostera marina
MMSRSYTNLLDLASGNFPVISGGGRDGRSGGMRRMPRVMTVPSNIAELEDEQASSVASDVQSSIIQDRLIIVGNQLPVVAKRRSDNAGWDFSWDDESLLLQLKDGLPDDMEVLYVGCLRVIVDPEEQDDVSQTLLEKFKCVPAFLTEEILEKYYHGFCKKLLWPLFHYMLPLTKDHGGRFDRSLWEAYVAVNKIFSQKVVEIISPEDDYVWIHDYHLMVLPTLLRRRFIRLRMGFFLHSPFPSSEIYRTLPVREEILNSLLCSDLIGFHTFDYARHFLSCCSRMMGLEYQSKRGYISLDYFGRTVGIKIMPASIHLGQLESMLKTVYKESKIEELERQFQGKTVILGVDDMDIFKGINLKLLAFEQMLKLRPNWQGRAVLVQIANPARGRGKGLESVEVEIRDICERINQQFGRVGYKPVVYINRSVSLKERIAYYTIAECVVVSAVRDGMNLIPYEYTVCKQGIAEPESDSLFADPKKSMLVVSEFIGCSPSLSGAIKINPWNSEATAEAMSDAISMPDGEKQLRHGKHYRYVRTHGVSYWSKSFMQDMERTCKDHFKRRCWGIGFGFGFRVVALDPNFKKLNVDSIVFSYERAKSRAILLDYDGTMINPLSINKTPSTEVISILNALSKDKKNVVFMVSGRGRESLGSWFSSCEKLGIAAEHGFFMRWGRDDEWTTWDKNKDFGWMLMADPVMKLYTEATDGSYIEAKESALVWHHRDADQTFGTSQAKEMLDHLENVLANEPVIAKRGQFIVEVKPQGVSKGLVADNILSTMAKRNCPADFVLCIGDDRSDEDMFENFGSKNLVSFNAHIYSCTVGQKPSKATYYLDDTNDVLEMLRALADASEEDDDDEEEIEDDYVDDESEEGSS

SEQ ID NO: 177 - DNA, 2598 bp, Zea mays
atggtttcaaaatcatactcaaatctgctagacctgacctctggagatggatttgactttcgacaaccttttaagtctcttcctcgtgtcgtaacttctcctggtattatatctgacactgattgggatacaataagtgatggtgattcagttggttcagcatcttctactgagaggaaaataatcgttgccaacttccttccgttgaattgtacaagagatgaaactggggtgctttccttctcattggatcatgatgcgcttctcatgcaacttaaagatagtttttcaaatgagactgatgttgtgtatgtgggcagtttgaaggttcaggtagatcctggtgagcaggaccaagttgcacagaagcttcttagagaatatcgatgcatacctacttttctcccatctgacctacagcagcagttctatcatggcttctgtaaacaacaattatggccactttttcattatatgcttccaatttgccttgacaagggtgagctatttgatcgcagcctgtttcaagcttatgtccgagccaacaaactttttgcagataaagttatggaagcaatcaatgcagatgatgacttcgtttgggttcatgattatcatctcatgttgctccctacattcttgaggaagaggttacaccgaataaagattggtttcttccttcacagtccttttccctcctcagaaatctataggactctgcctgtaagggatgaaatcctgaagtcactgcttaatgctgatctcattggtttccaaacatttgactatgcccgccacttcctatcttgctgtagcagattgctaggcctgcattatgagtcaaaacgtggttacattggaatagagtattttggccgaacagtgagcctgaagatcctttccgtgggtgtccatattggtcggcttgaatctgtcttaaaattgcctgctacagttagtaaggttcaagaaattgaacaaaggtataagggcaagatactgatgttaggtgtagatgacatggacatcttcaaagggataagtctgaaatttcttggactggagcttcttctggacagaaacccaaagcttagagagaaggttgtccttgtacaaatcatcaatccagcaagaagcacagggaaggacgtgcaagaagctattacagaagctgtctctgtggctgaaaggattaatacaaattatggttcttcaagttacaagcctgttgtcctaattgatcaccacataccattttatgaaaagattgcattctatgctgcgtctgattgctgtattgtaaatgctgtgagggatggcatgaacttagtaccatatgagtatactgtttgccgacagggaaatgaggagattgataaactcagaggtcttggcaaagacacccatcacacaagcacacttattgtttcggagtttgtgggttgctccccatctcttagtggtgctttcagggtaaatccttggagtgtcgatgatgtggcggatgccttgtgccgtgcaactgatttgactgaatccgagaaacggctgcggcatgaaaagcattatcgctatgtcagtactcatgatgttgcttactgggcacgcagctttgctcaagatctggaaagagcatgcaaagatcattatagcagaaggtgttgggcgattggattcggtctgaattttagagttattgctctttctcctggcttcagaaagctgtcgtcagagcactttgtttcttcttataacaaggcttctagaagagcaatatttcttgattacgatggcacacttgtgccccagtcatcaatcaacaaagctccaagtgaagaagtcatttccgttcttaacaccttatgtaatgatccaaagaacattgtgtttatagtaagtggacgaggacgtgattcccttgatgagtggttttctccgtgtgagaagcttggtctagcggcagaacatggctattttatcagatggagcaaggaagccgcatgggagtcaagctattcaaggccgcagcaagaatggaagcacattgccgaacctgtgatgcaggtatacacagagacaacagatggatcttcaatcgagtcaaaggaaagcgccctagtatggcactatttggacgcggaccatgatttcggttccttccaagcaaaggagctacaaggtcatcttgagagggtgctatcgaatgagcctgttgttgtgaagtgtggtcattatattgtagaggtgaaaccacagggagttagcaaggggcttgctgtcaacaagctgattcacacactggtcaagaacgggaaggcaccggatttcctgatgtgcgtcggcaacgacagatctgatgaggacatgtttgaaagcatcaacggtatgacctccaacgctgtcttatcacccacaatgccggagctgtttgcctgttcagtcggtcagaagcccagcaaagcaaaatattatgtggacgacaccagcgaagtaatcagattgctcaagaatgtaacccgcatcccctcgcagcggcaggatgtcagtgccagccatgggcgtgtgaccttcagaggcgtgctcgattacgtggactag

SEQ ID NO: 178 - protein, 865 aa, Zea mays
MVSKSYSNLLDLTSGDGFDFRQPFKSLPRVVTSPGIISDTDWDTISDGDSVGSASSTERKIIVANFLPLNCTRDETGVLSFSLDHDALLMQLKDSFSNETDVVYVGSLKVQVDPGEQDQVAQKLLREYRCIPTFLPSDLQQQFYHGFCKQQLWPLFHYMLPICLDKGELFDRSLFQAYVRANKLFADKVMEAINADDDFVWVHDYHLMLLPTFLRKRLHRIKIGFFLHSPFPSSEIYRTLPVRDEILKSLLNADLIGFQTFDYARHFLSCCSRLLGLHYESKRGYIGIEYFGRTVSLKILSVGVHIGRLESVLKLPATVSKVQEIEQRYKGKILMLGVDDMDIFKGISLKFLGLELLLDRNPKLREKVVLVQIINPARSTGKDVQEAITEAVSVAERINTNYGSSSYKPVVLIDHHIPFYEKIAFYAASDCCIVNAVRDGMNLVPYEYTVCRQGNEEIDKLRGLGKDTHHTSTLIVSEFVGCSPSLSGAFRVNPWSVDDVADALCRATDLTESEKRLRHEKHYRYVSTHDVAYWARSFAQDLERACKDHYSRRCWAIGFGLNFRVIALSPGFRKLSSEHFVSSYNKASRRAIFLDYDGTLVPQSSINKAPSEEVISVLNTLCNDPKNIVFIVSGRGRDSLDEWFSPCEKLGLAAEHGYFIRWSKEAAWESSYSRPQQEWKHIAEPVMQVYTETTDGSSIESKESALVWHYLDADHDFGSFQAKELQGHLERVLSNEPVVVKCGHYIVEVKPQGVSKGLAVNKLIHTLVKNGKAPDFLMCVGNDRSDEDMFESINGMTSNAVLSPTMPELFACSVGQKPSKAKYYVDDTSEVIRLLKNVTRIPSQRQDVSASHGRVTFRGVLDYVD

SEQ ID NO: 179 - DNA, 2742 bp, Zea mays
atgatgtcgcggtcgtacaccaacctgctcgacctcgcggagggcaacttcgcggcgctgggcccggccgccggcgccggcggcagcgggcggcagaggcatgggtcgttcgggctgcggcggatgtcgcgggtgatgacggtgccggggacgctgacggagctcgacggcgaggacgagtcggagccggccgcgaccagcagcgtcgcctccgacgtgccctcgtccgtggcggcggaccgcctcatagtggtctcgaatcagttgcccatcgtcgcgcgccgcaggcccgacggccgagggtggtccttctcgtgggacgatgactcgctcctgctccagctccgcgacggcattcccgacgagatggaggtgctcttcgtcggatcactccgcgccgacgtccccgcagccgagcaggacgcggtatcgcaggcgctgctcgaccgattccgctgcgcgccggtgttcctccctgaccacctcaacgaccggttctaccacggcttctgcaagcgccagctctggcctctgttccactacatgctccccttctcatcgcccgcttccgcgtctgccgccgctacctcttcctccgtcgccacttcgtcacccggcaacggttgcttcgaccgcagcgcttgggaggcatacgtgctcgccaacaagttcttctttgagaaggtcgtcgaggtaatcaacccggaggatgactacgtctgggttcacgactaccatctcatggcgctgcctaccttcctccgccgctgcttcaaccgcctccgcatcggattcttcctccacagccccttcccctcgtccaagatctaccgcaccctccctgttcgggaggagatactcaaggcgctgctcaactgtgacctaattggcttccacacttttgattacgccaggcacttcctctcgtgctgcagtaggatgctgggaattgaataccagtcaaagcgtgggtacattgaattggattactttggccgcactgtcgggatcaaaatcatgccagtgggagttcatatgggtcaattggagttgggtctgcgcttgcctgatagggaatggaggctttctgagcttcaacgccagtttcaggggaaaactgtcttgcttggtgtggatgatatggatatctttaaggggatcaatttgaagcttctcgcctttgagaacatgttgaggacacatcccaagtggcaggggagagcagtgttagtgcagattgctaacccagcccgtggaaggggtaaagatctggaagccatccaggctgagattgaggagagctgccagcggatcaatggagactttggccagtcagggtatagccctgttgttttcatcgatcgtgatgtgtcaagtgttgagaagattgcctattatacgatagcggaatgtgtggtggtgactgctgtgagggatgggatgaacttgacaccgtatgaatacgttgtctgtaggcagggtgcaccaggatctcagtcggtagcagaggtgagtgggccaaagaagagcatgctggttgtgtcagagtttattggctgctcaccgtcactgagcggtgctattagggttaacccatggaatatagaggcaaccgcggaggcgatgaatgaggccatttcaatgccagaacaggaaaaacagttgaggcatgagaaacattaccgttatgtcaggagccatgacgtcgcttattggtcaaagagcttcatcatagacttggaaagggtttgtaaggatcacttcaagaggacttgttggggcatagggttgggttttggtttcagggtggtggccttggaccctcatttcacaaagcttaacatggattcaatcattaatgcttatgagctttcagagagcagggctatattgctcgattatgatggaactctggttccccaaacttccctcaacaaggaacctagtccacaggttttgagcatcatcaataccctttgctcagatagtagaaacatcgtttttcttgtcagtggtcgagacaaagataccttgggaaagtggttctcctcatgtccaagattggggattgcagctgaacatggttacttcttgaggtggtctagagaagaagagtggcaaacatgcactcaggcattggacttcggatggatgcaaatggcgaagccagtgatgaatttatatacagaagcaactgatggatcctacattgaggccaaggaaagtgccttggtgtggcaccatcaggatgctgacctaggctttggatcctcacaggcaaaggagatgcttgatcacctggaaagtgtactagcaaatgaaccagtctctgtcaagagtggccagttcattgttgaagtcaaaccacagggaataagcaaaggaatagttgctgagaggatacttgcatcagtgaaggagagaggaaagcaggctgatttcttattgtgcatcggcgatgataggtctgatgaggacatgtttgaaaatattgctgatatcactgggaggaatttggttgctccaagaacagcactgtttgcgtgcactgtgggacaaaaaccaagcaaagccaaattctatctggatgatacattcgaagtggtcactatgctgagcgcactggcagatgccacaggtcctgagactgattcggctgatgaatctgtcgcatatatctcatcacttgatattggtgacgaacaatcagaatccagtgataaaccagttgaagggtcttag

SEQ ID NO: 180 - protein, 913 aa, Zea mays
MMSRSYTNLLDLAEGNFAALGPAAGAGGSGRQRHGSFGLRRMSRVMTVPGTLTELDGEDESEPAATSSVASDVPSSVAADRLIVVSNQLPIVARRRPDGRGWSFSWDDDSLLLQLRDGIPDEMEVLFVGSLRADVPAAEQDAVSQALLDRFRCAPVFLPDHLNDRFYHGFCKRQLWPLFHYMLPFSSPASASAAATSSSVATSSPGNGCFDRSAWEAYVLANKFFFEKVVEVINPEDDYVWVHDYHLMALPTFLRRCFNRLRIGFFLHSPFPSSKIYRTLPVREEILKALLNCDLIGFHTFDYARHFLSCCSRMLGIEYQSKRGYIELDYFGRTVGIKIMPVGVHMGQLELGLRLPDREWRLSELQRQFQGKTVLLGVDDMDIFKGINLKLLAFENMLRTHPKWQGRAVLVQIANPARGRGKDLEAIQAEIEESCQRINGDFGQSGYSPVVFIDRDVSSVEKIAYYTIAECVVVTAVRDGMNLTPYEYVVCRQGAPGSQSVAEVSGPKKSMLVVSEFIGCSPSLSGAIRVNPWNIEATAEAMNEAISMPEQEKQLRHEKHYRYVRSHDVAYWSKSFIIDLERVCKDHFKRTCWGIGLGFGFRVVALDPHFTKLNMDSIINAYELSESRAILLDYDGTLVPQTSLNKEPSPQVLSIINTLCSDSRNIVFLVSGRDKDTLGKWFSSCPRLGIAAEHGYFLRWSREEEWQTCTQALDFGWMQMAKPVMNLYTEATDGSYIEAKESALVWHHQDADLGFGSSQAKEMLDHLESVLANEPVSVKSGQFIVEVKPQGISKGIVAERILASVKERGKQADFLLCIGDDRSDEDMFENIADITGRNLVAPRTALFACTVGQKPSKAKFYLDDTFEVVTMLSALADATGPETDSADESVAYISSLDIGDEQSESSDKPVEGS

SEQ ID NO: 181 - DNA, 2595 bp, Zea mays
atggttctgaagtcgcacacaaatctgctagatatgtgttgtgaagatgtgtttgacttccaacaacctttaagatctcctcgtcatgtggtgaactctcctggcatcatatctgaccctgattgggaaagtagtaatgatggcaactcagttggttctatgcctttttgttttaagagaaagattattgttgcaaatttccttcctgtgatctgtgcaaaaaatgaagctaccggagaatggtcctttgccatggatgataatcaactgcttgttcaactcaaagatggttttccaattggtaatgaagttatttatgtgggtagtttgaatgttcaagttgatcctattgagcaagatcgagtttctcagaagctcttcaaggaacacagatgcgtacctacctttctcccagctgaactccagcatcaattctatcacatattctgcaaacagcacttatggccacttttccattatatgcttcctgtttgtcatgacaaagatgagctctttgaccgttccctttttcaagcctacgtgcgggccaacaaaatttttgctgacaaaattgtggaggcagtcaattcggatgatgattgtgtgtgggttcatgattatcacctcatgcttatcccaacccttttaagaaagaaactgcaccggatcaaagttggtttcttcctccacagcccatttccctcgtctgagatctataggacactgccagtgcgggatgaaattctaaaatcacttcttaatgctgacctcattggctttcaaacttttgactatgcccgccacttcctttcatgttgcagcaggcttttaggccttaattatgagtccaaacgtggccacataggtatagagtacttcggccgaacagtgagcctcaagattcttgctgcaggtgtacatgttggccggcttgaggctacattgaggttgcctgctacaattaaaaaggttcaagaaattgagagtagatatagtggcaagttggtaatattaggtgtagatgacatggacatctttaaaggtatcagtctaaaactgcttggcttggagcttcttctggaaagaacacctaagcttcgaggcaaggttgtccttgtacagattgttaatcctgcaagaagcatcggaaaagacattgaggaagcgaaatatgaagctgaatctgtagctcaaaggataaatgataaatatggttctgctaattacaagcctgttgtcctcattgactactcaatacctttctatgaaaagatcgcattttatgctgcatctgactgctgtattgtaaatgctgtgagggatggcatgaatttgataccgtatgagtacaccgtatgcaggcagggaaatgaggagcttgataagctcagaggtcttaataagagctcatctcacacaagcacacttattgtgtctgaatttgtgggttgctctccatcacttagtggagcattcagggtaaatccttggagtatggaagatgtggctgatgcattatacagtgtaacagacctgacacgatatgagaagaatctgcgccatgaaaagcactatcgctatgtcaggtctcatgatgttgcttactgggcacgcagctttgaccaggatctggataaagcatgcatagagcaatacagccaaagatgttggacaactgggtttggtttaaattttagagttattgccctttcacctgggtttagaagactgtctctagaacacctagcctcgtcttataagaaggctaacaggaggatgatattcctggactacgatgggacccttgtgccgcagacatcacacgacaaatctccaagcgctgaacttatctctacccttaacagcttgtgcagtgatatgaagaacacagtatttatagtcagcggacgaggaagagattccctaagcgagtggtttgcttcatgcgagaacctcggtatcgctgccgaacatggttactttatcagatggaacaaagcagctgaatgggagacaagcttctcaggtatttattctgaatggaagctcatcgcggaccctatcatgcatgtatacatggaaacaactgatgggtccttcatagagccaaaagagagcgctttggtatggcactatcagaacacggatcatgactttggctcgtgccaggcaaaggagctagtgagccatcttgagcgagtcctatcgaacgaacctgttgtcgtgaggcgtggccatcagatcgtagaagttaaacctcagggagttagcaaggggatttccgtggacaagatcatccggaccttggtcagcaaaggggaagtaccagaccttttgatgtgcatcggaaacgatcggtcggacgaggacatgttcgagagcatcaacagagccacctccctttccgagcttcctgccgctccagaagtattcgcctgttccgttggccccaaggccagcaaggcaaactactacgtcgatggctgcgacgaagtaatcagactgctgaagggtgtcacagccgtttcgctccaaaaggatactgccggccatagccatgcggcattcgaggatacgcttgaggttgtcagctga

SEQ ID NO: 182 - protein, 864 aa, Zea mays
MVLKSHTNLLDMCCEDVFDFQQPLRSPRHVVNSPGIISDPDWESSNDGNSVGSMPFCFKRKIIVANFLPVICAKNEATGEWSFAMDDNQLLVQLKDGFPIGNEVIYVGSLNVQVDPIEQDRVSQKLFKEHRCVPTFLPAELQHQFYHIFCKQHLWPLFHYMLPVCHDKDELFDRSLFQAYVRANKIFADKIVEAVNSDDDCVWVHDYHLMLIPTLLRKKLHRIKVGFFLHSPFPSSEIYRTLPVRDEILKSLLNADLIGFQTFDYARHFLSCCSRLLGLNYESKRGHIGIEYFGRTVSLKILAAGVHVGRLEATLRLPATIKKVQEIESRYSGKLVILGVDDMDIFKGISLKLLGLELLLERTPKLRGKVVLVQIVNPARSIGKDIEEAKYEAESVAQRINDKYGSANYKPVVLIDYSIPFYEKIAFYAASDCCIVNAVRDGMNLIPYEYTVCRQGNEELDKLRGLNKSSSHTSTLIVSEFVGCSPSLSGAFRVNPWSMEDVADALYSVTDLTRYEKNLRHEKHYRYVRSHDVAYWARSFDQDLDKACIEQYSQRCWTTGFGLNFRVIALSPGFRRLSLEHLASSYKKANRRMIFLDYDGTLVPQTSHDKSPSAELISTLNSLCSDMKNTVFIVSGRGRDSLSEWFASCENLGIAAEHGYFIRWNKAAEWETSFSGIYSEWKLIADPIMHVYMETTDGSFIEPKESALVWHYQNTDHDFGSCQAKELVSHLERVLSNEPVVVRRGHQIVEVKPQGVSKGISVDKIIRTLVSKGEVPDLLMCIGNDRSDEDMFESINRATSLSELPAAPEVFACSVGPKASKANYYVDGCDEVIRLLKGVTAVSLQKDTAGHSHAAFEDTLEVVS

SEQ ID NO: 183 - protein, 909 aa, Artificial Sequence
  Consensus sequence for Figure 10
  misc_feature (6)..(6): Xaa can be any naturally occurring amino acid
  misc_feature (9)..(9): Xaa can be any naturally occurring amino acid
  misc_feature (15)..(15): Xaa can be any naturally occurring amino acid
  misc_feature (17)..(17): Xaa can be any naturally occurring amino acid
  misc_feature (19)..(19): Xaa can be any naturally occurring amino acid
  misc_feature (22)..(42): Xaa can be any naturally occurring amino acid
  misc_feature (44)..(44): Xaa can be any naturally occurring amino acid
  misc_feature (60)..(67): Xaa can be any naturally occurring amino acid
  misc_feature (72)..(72): Xaa can be any naturally occurring amino acid
  misc_feature (74)..(77): Xaa can be any naturally occurring amino acid
  misc_feature (97)..(97): Xaa can be any naturally occurring amino acid
  misc_feature (100)..(102): Xaa can be any naturally occurring amino acid
  misc_feature (104)..(104): Xaa can be any naturally occurring amino acid
  misc_feature (120)..(120): Xaa can be any naturally occurring amino acid
  misc_feature (123)..(123): Xaa can be any naturally occurring amino acid
  misc_feature (127)..(127): Xaa can be any naturally occurring amino acid
  misc_feature (134)..(135): Xaa can be any naturally occurring amino acid
  misc_feature (138)..(139): Xaa can be any naturally occurring amino acid
  misc_feature (143)..(144): Xaa can be any naturally occurring amino acid
  misc_feature (164)..(164): Xaa can be any naturally occurring amino acid
  misc_feature (172)..(172): Xaa can be any naturally occurring amino acid
  misc_feature (190)..(190): Xaa can be any naturally occurring amino acid
  misc_feature (195)..(198): Xaa can be any naturally occurring amino acid
  misc_feature (204)..(204): Xaa can be any naturally occurring amino acid
  misc_feature (327)..(327): Xaa can be any naturally occurring amino acid
  misc_feature (345)..(345): Xaa can be any naturally occurring amino acid
  misc_feature (348)..(348): Xaa can be any naturally occurring amino acid
  misc_feature (357)..(357): Xaa can be any naturally occurring amino acid
  misc_feature (365)..(366): Xaa can be any naturally occurring amino acid
  misc_feature (389)..(389): Xaa can be any naturally occurring amino acid
  misc_feature (395)..(396): Xaa can be any naturally occurring amino acid
  misc_feature (426)..(426): Xaa can be any naturally occurring amino acid
  misc_feature (428)..(428): Xaa can be any naturally occurring amino acid
  misc_feature (438)..(438): Xaa can be any naturally occurring amino acid
  misc_feature (440)..(440): Xaa can be any naturally occurring amino acid
  misc_feature (442)..(442): Xaa can be any naturally occurring amino acid
  misc_feature (450)..(450): Xaa can be any naturally occurring amino acid
  misc_feature (454)..(454): Xaa can be any naturally occurring amino acid
  misc_feature (490)..(491): Xaa can be any naturally occurring amino acid
  misc_feature (494)..(496): Xaa can be any naturally occurring amino acid
  misc_feature (499)..(501): Xaa can be any naturally occurring amino acid
  misc_feature (503)..(503): Xaa can be any naturally occurring amino acid
  misc_feature (505)..(505): Xaa can be any naturally occurring amino acid
  misc_feature (540)..(540): Xaa can be any naturally occurring amino acid
  misc_feature (543)..(543): Xaa can be any naturally occurring amino acid
  misc_feature (547)..(547): Xaa can be any naturally occurring amino acid
  misc_feature (585)..(585): Xaa can be any naturally occurring amino acid
  misc_feature (603)..(603): Xaa can be any naturally occurring amino acid
  misc_feature (616)..(617): Xaa can be any naturally occurring amino acid
  misc_feature (622)..(622): Xaa can be any naturally occurring amino acid
  misc_feature (637)..(639): Xaa can be any naturally occurring amino acid
  misc_feature (643)..(643): Xaa can be any naturally occurring amino acid
  misc_feature (648)..(648): Xaa can be any naturally occurring amino acid
  misc_feature (655)..(655): Xaa can be any naturally occurring amino acid
  misc_feature (659)..(659): Xaa can be any naturally occurring amino acid
  misc_feature (662)..(662): Xaa can be any naturally occurring amino acid
  misc_feature (678)..(678): Xaa can be any naturally occurring amino acid
  misc_feature (683)..(683): Xaa can be any naturally occurring amino acid
  misc_feature (700)..(703): Xaa can be any naturally occurring amino acid
  misc_feature (709)..(711): Xaa can be any naturally occurring amino acid
  misc_feature (714)..(714): Xaa can be any naturally occurring amino acid
  misc_feature (718)..(718): Xaa can be any naturally occurring amino acid
  misc_feature (726)..(726): Xaa can be any naturally occurring amino acid
  misc_feature (735)..(735): Xaa can be any naturally occurring amino acid
  misc_feature (738)..(738): Xaa can be any naturally occurring amino acid
  misc_feature (769)..(769): Xaa can be any naturally occurring amino acid
  misc_feature (777)..(777): Xaa can be any naturally occurring amino acid
  misc_feature (803)..(804): Xaa can be any naturally occurring amino acid
  misc_feature (806)..(806): Xaa can be any naturally occurring amino acid
  misc_feature (808)..(809): Xaa can be any naturally occurring amino acid
  misc_feature (811)..(811): Xaa can be any naturally occurring amino acid
  misc_feature (838)..(838): Xaa can be any naturally occurring amino acid
  misc_feature (840)..(840): Xaa can be any naturally occurring amino acid
  misc_feature (842)..(845): Xaa can be any naturally occurring amino acid
  misc_feature (854)..(855): Xaa can be any naturally occurring amino acid
  misc_feature (868)..(868): Xaa can be any naturally occurring amino acid
  misc_feature (876)..(876): Xaa can be any naturally occurring amino acid
  misc_feature (880)..(880): Xaa can be any naturally occurring amino acid
  misc_feature (885)..(885): Xaa can be any naturally occurring amino acid
  misc_feature (888)..(893): Xaa can be any naturally occurring amino acid
  misc_feature (895)..(897): Xaa can be any naturally occurring amino acid
  misc_feature (902)..(902): Xaa can be any naturally occurring amino acid
  misc_feature (904)..(909): Xaa can be any naturally occurring amino acid
MVSRSXANXLDLASXDXLXFPXXXXXXXXXXXXXXXXXXXXXRXLPRVMTVPGIISELDXXXXXXXXSSDVXSXXXXSRERKIIVANMLPLQAKRDXETXXXWXFSWDEDSLLLQLRDGXFSXDTEXLYVGSLXXDIXXSEQXXEEVSQKLLEEFNCVPTFLPXELQEKFYXGFCKHHLWPLFHYMLPMXPDHGXXXXDRFDRXLWQAYVSANKIFSDRVMEVINPEDDYVWIHDYHLMVLPTFLRKRFNRIKLGFFLHSPFPSSEIYRTLPVRDELLRGLLNCDLIGFHTFDYARHFLSCCSRMLGLDYESKRGHIGLDYFGRTVXIKILPVGIHMGRLESVLXLPXTAAKVKEIXEQFKGKKXXLILGVDDMDIFKGISLKLIAMEXLLETYXXLRGKVVLVQIVNPARSSGKDVEEVKKETYXTXKRINERYGSXGXYXPVVLIDRXVPRXEKTAYYAVADCCLVNAVRDGMNLVPYKYIVCRQGTXXLDXXXGIXXXSXRXSMLVVSEFIGCSPSLSGAIRVNPWDVDAVAEAMNXALXMSEXEKQLRHEKHYRYVSTHDVGYWAKSFMQDLERACRDHYXKRCWGIGFGLGFRVVSLXPSFRKLSIEHIVXXYRKTXRRAIFLDYDGTLVPXXXSSIXKTPSXEVISVLXALCXDPXNTVFIVSGRGRESLSXWLSPXCENLGIAAEHGYFIRWXXXXEWETCXXXADXEWKXMVEPVMRXYMEATDGSXIEXKESALVWHHQDADPDFGSCQAKELLDHLESXVLANEPVXVKRGQHIVEVKPQGVSKGLAAEKVIXXMXEXXGXPPDFVLCIGDDRSDEDMFESILSTVTXPXLXXXXEIFACTVGXXRKPSKAKYFLDDXADVLKLLXGLAXASSSXKPXXXXXXSXXXTQVAXEXXXXXX

SEQ ID NO: 184 - DNA, 153 bp, Silene pratensis
atggcttctacactctctaccctctcggtgagcgcatcgttgttgccaaagcaacaaccgatggtcgcctcatcgctaccaactaatatgggtcaagccttgtttggactgaaagccggttctcgtggcagagtgactgcaatggccacctac

SEQ ID NO: 185 - DNA, 519 bp, Arabidopsis thaliana
ttagatctcgtgccgtcgtgcgacgttgttttccggtacgtttattcctgttgattccttctctgtctctctcgattcactgctacttctgtttggattcctttcgcgcgatctctggatccgtgcgttattcattggctcgtcgttttcagatctgttgcgtttcttctgttttctgttatgagtggatgcgttttcttgtgattcgcttgtttgtaatgctggatctgtatctgcgtcgtgggaattcaaagtgatagtagttgatattttttccagatcaggcatgttctcgtataatcaggtctaatggttgatgattctgcggaattatagatctaagatcttgattgatttagatttgaggatatgaatgagattcgtaggtccacaaaggtcttgttatctctgctgctagatagatgattatccaattgcgtttcgtagttatttttatggattcaaggaattgcgtgtaattgagagttttactctgttttgtgaacaggcttgatcaaa

SEQ ID NO: 186 - DNA, 847 bp, Arabidopsis thaliana
tggtgcttaaacactctggtgagttctagtacttctgctatgatcgatctcattaccatttcttaaatttctctccctaaatattccgagttcttgatttttgataacttcaggttttctctttttgataaatctggtctttccatttttttttttttgtggttaatttagtttcctatgttcttcgattgtattatgcatgatctgtgtttggattctgttagattatgtattggtgaatatgtatgtgtttttgcatgtctggttttggtcttaaaaatgttcaaatctgatgatttgattgaagcttttttagtgttggtttgattcttctcaaaactactgttaatttactatcatgttttccaactttgattcatgatgacacttttgttctgctttgttataaaattttggttggtttgattttgtaattatagtgtaattttgttaggaatgaacatgttttaatactctgttttcgatttgtcacacattcgaattattaatcgataatttaactgaaaattcatggttctagatcttgttgtcatcagattatttgtttcgataattcatcaaatatgtagtccttttgctgatttgcgactgtttcattttttctcaaaattgttttttgttaagtttatctaacagttatcgttgtcaaaagtctctttcattttgcaaaatcttctttttttttttgtttgtaactttgttttttaagctacacatttagtctgtaaaatagcatcgaggaacagttgtcttagtagacttgcatgttcttgtaacttctatttgtttcagtttgttgatgactgctttgattttgtaggtcaaa

SEQ ID NO: 187 - DNA, 822 bp, Oryza sativa
ggttcttggtatatgccaacttttgtagcctgcaccagaaacaaaaatgaagacttttgctaaagatgtaaaagtggcatgatgtcctggatgaccaaataattcatgacaaatggattaaaagagcccaatatctgaaagagactggccagcagccactaatgtcaccaaccacatatgtaacacttggtgcataattcaagagggagcatctcctccagaatcaggattgaaaggtacaacctcatagtaaatcctcggaatatagcatgtgcagcataagaatatatcagtgttgtgctgggtaagaaaccacatgaaccaattaggaataaataatcatgctgaaattatagcaatgcttgcaatttgcaaacgataaagctagacgcgggttgctggaataacaatccatctccaacaaaatagtacagaatataactgaatggccagctcagaccctaacagaattgaaaagctggattcatcagcactccattgagcaatctagatcaggaaagagcatagatgcataatgaactgagatcccttcaaaatgactaactaatatttttttttcttataaaagagtttacaacagtacaaccacgaagatcagcactaccattactgattttgttaacatagagtgatttatcatgtgtgccagacaaacaacagatacattcatacatagcataacttacagcacatgatacagactacggagaacggttaatcttaaaataaaaacaaaaaaacaaggaggcaaagcttattttgcctgggattcatctaaatgcagttgtgtgcagaaggaga

SEQ ID NO: 188 - DNA, 946 bp, Zea mays
tgcagtgcagcgtgacccggtcgtgcccctctctagagataatgagcattgcatgtctaagttataaaaaattaccacatattttttttgtcacacttgtttgaagtgcagtttatctatctttatacatatatttaaactttactctacgaataatataatctatagtactacaataatatcagtgttttagagaatcatataaatgaacagttagacatggtctaaaggacaattgagtattttgacaacaggactctacagttttatctttttagtgtgcatgtgttctcctttttttttgcaaatagcttcacctatataatacttcatccattttattagtacatccatttagggtttagggttaatggtttttatagactaatttttttagtacatctattttattctattttagcctctaaattaagaaaactaaaactctattttagtttttttatttaatagtttagatataaaatagaataaaataaagtgactaaaaattaaacaaataccctttaagaaattaaaaaaactaaggaaacatttttcttgtttcgagtagataatgccagcctgttaaacgccgtcgacgagtctaacggacaccaaccagcgaaccagcagcgtcgcgtcgggccaagcgaagcagacggcacggcatctctgtcgctgcctctggacccctctcgagagttccgctccaccgttggacttgctccgctgtcggcatccagaaattgcgtggcggagcggcagacgtgagccggcacggcaggcggcctcctcctcctctcacggcaccggcagctacgggggattcctttcccaccgctccttcgctttcccttcctcgcccgccgtaataaatagacaccccctccacaccctctttccccaacctcgtgttgttcggagcgcacacacacacaaccagatc

SEQ ID NO: 189 - DNA, 866 bp, Zea mays
ttttactaaatcacgataaataaaaaagaatggatgtagtatatgtttgaggccacatattatatgaaataagtgaatgctcgtgaatgcggcatagcggagactgcagggacgaggacgccacaagcttccttcccgtgtgcctgtggactgtgtggtgaagccaggggagtcacaacaggaaacctccagaaatccgacggccatgaaggtttctagagccgccgccgccgccgccgccggatgttaacattaatttcaagcagtcaaaagttgaattgtataacggctgattccgcgcgccggacataatattaactttcgacggactggcgaaagttttagatccatttctctctatataattttgatataaattaagtttatcatgatctgatgagatgacaaatgaaaccacgcgctgacgcggatgattatctagctaggagagagtttcttttttgtttttgttttttgtttctcccagtcatggtggaaataaaggcgaattcttatccagcaggtatatttgttttttccccacactgcaatggtggaaaggcgagttcttatccagcagctagcgcgccatggtggaaaggcgtatcattatcctaccctgctgccgatgaacttgtgttctttcttctcaaactttcgttcttttcctattttctttatcctgccctgcgcacacgaaacatgctaattaaagacgtacgcgatgcgtcctaagcttctccactaataatataaccccgagcatgcacgcacgctgatcatccatctataaatacgccaattagcaaactagagctactagcagcaggccaatggagaaccctccgagcatcctagtgactccc

SEQ ID NO: 190 - DNA, 2589 bp, Artificial Sequence
  AtTPS11 codon optimized for expression in Zea mays
atgtcgccggagtcttggaaagaccagctcagtctggtttctgctgacgattaccggataatgggtcggaaccggatccccaacgccgtcactaaactgtccggtctcgagaccgacgatcctaacggtggcgcttgggtgactaagccgaaacggatcgtggtttcgaaccagcttccacttcgtgcccaccgcgatatctcgtccaacaagtggtgcttcgagttcgacaacgactcgctgtacctccagctcaaagacggatttccaccggagacggaggtcgtgtacgtcggctcactcaacgccgacgtacttccttcagagcaagaggacgtgtctcagttcctgctcgagaagtttcagtgtgtccctacgttcctccctagtgacctgctcaacaagtactaccacggcttctgcaaacactatctctggccgatcttccactacctgcttccaatgacgcaagcccaaggctcgctgttcgaccgtagcaactggagagcgtacacgaccgttaacaagatcttcgctgataagatcttcgaggtgttgaatccggacgacgattacgtctggatccacgactatcacctgatgatcctacccacctttctccgcaaccgattccatcggatcaagctcgggatcttcctccacagcccctttccttcgagcgagatctaccgtacactccctgtgagagacgagattctcaaagggtttctcaactgcgatctggttggtttccacacgttcgactacgctaggcacttcctgtcttgctgttcgaggatgctcggacttgactacgagagtaagagaggctatatcgggctagagtacttcggacgcacggtctcgatcaagatcctgcccgtcgggatccatatgggacagatagaatcgatcaaggcgtccgagaagacggcagagaaagtgaagagactccgtgagcgcttcaaggggaatatcgtgatgctcggggtcgacgacttggatatgttcaaaggtatcagcttgaagttctgggctatgggacagttgctcgagcaaaacgaggagctccgtgggaaggtggttctcgtccaaatcacaaatcctgctaggagttcgggcaaggacgttcaagacgtggagaaacagatcaacttgattgctgacgagatcaattctaagtttgggaggcctggtggctacaagccaatcgtgtttatcaacggacctgtctccactctggataaagtcgcttattacgcaatctcggagtgcgtagtcgtgaacgctgtgagagacgggatgaacctcgtgccttacaagtacacagtgactcggcaagggagtcctgctttggacgcggctctcggtttcggggaggacgacgtgagaaagtctgtgattatcgtctctgagtttatcggctgctctccaagtctgagtggtgcgatccgcgtgaacccgtggaatatcgacgccgtcactaacgcgatgagctcagcaatgacgatgtccgacaaggagaagaacctgcgccaccagaagcaccacaagtatatctcctctcacaacgttgcgtattgggcgcggagttacgaccaagacctccagcgtgcttgcaaagaccactacaacaagagattctggggagtcggcttcgggctgttcttcaaggtggttgccttggatccgaacttcagaaggctctgcggtgaaactatagtccccgcgtataggcgttcaagcagtaggcttatcctgttggactacgacggcacaatgatggaccaagacactctggacaaacgtcccagtgacgatctgatcagtcttctcaatcgcctctgtgacgatcccagcaatctggtctttatcgtgagtggccgtggtaaggaccctctcagcaagtggtttgactcctgcccaaacctcggtatctccgctgagcacggttacttcacgagatggaattccaactcgccttgggagacaagtgagttgcctgcggatcttagctggaagaagatcgcgaaacccgtgatgaaccactatatggaggcgactgacggatcatttatcgaagagaaggagagtgcgatggtctggcaccaccaagaggctgaccactcgttcggatcctggcaagctaaggagctgctagatcatctcgagtcagtgctcacaaacgagcctgtggtagtgaagagaggccagcatatcgtcgaagtgaagcctcagggagtcagcaagggaaaggtggtggagcacctgattgcaacgatgaggaacaccaagggcaagagacctgacttcttgctctgtatcggtgacgaccggtctgacgaagatatgtttgactcgatagtgaagcaccaggacgtttcctctatcggtctcgaagaggtctttgcgtgcactgttggccagaaaccgagcaaggccaagtactatctcgacgataccccaagcgtaatcaagatgctggagtggcttgcctccgcttcagacggatctaagcacgagcaacagaagaagcagagcaagttcactttccaacagccaatgggtcagtgccggaagaaggcgtag

SEQ ID NO: 191 - DNA, 1012 bp, Zea mays
gtacgccgctcgtcctccccccccccccccctctctaccttctctagatcggcgttccggtccatggttagggcccggtagttctacttctgttcatgtttgtgttagatccgtgtttgtgttagatccgtgctgctagcgttcgtacacggatgcgacctgtacgtcagacacgttctgattgctaacttgccagtgtttctctttggggaatcctgggatggctctagccgttccgcagacgggatcgatttcatgattttttttgtttcgttgcatagggtttggtttgcccttttcctttatttcaatatatgccgtgcacttgtttgtcgggtcatcttttcatgcttttttttgtcttggttgtgatgatgtggtctggttgggcggtcgttctagatcggagtagaattctgtttcaaactacctggtggatttattaattttggatctgtatgtgtgtgccatacatattcatagttacgaattgaagatgatggatggaaatatcgatctaggataggtatacatgttgatgcgggttttactgatgcatatacagagatgctttttgttcgcttggttgtgatgatgtggtgtggttgggcggtcgttcattcgttctagatcggagtagaatactgtttcaaactacctggtgtatttattaattttggaactgtatgtgtgtgtcatacatcttcatagttacgagtttaagatggatggaaatatcgatctaggataggtatacatgttgatgtgggttttactgatgcatatacatgatggcatatgcagcatctattcatatgctctaaccttgagtacctatctattataataaacaagtatgttttataattatttcgatcttgatatacttggatgatggcatatgcagcagctatatgtggatttttttagccctgccttcatacgctatttatttgcttggtactgtttcttttgtcgatgctcaccctgttgtttggtgttacttctgcag

1. A recombinant construct comprising:
(a) a first expression cassette comprising a first promoter that is functional in a plant and is heterologous and operably linked to a first nucleic acid molecule; and
(b) a second expression cassette comprising a second promoter that is functional in a plant and is heterologous and operably linked to a second nucleic acid molecule,
wherein the first nucleic acid molecule comprises:
(i) the nucleotide sequence of SEQ ID NO: 120, 122, 123, 125, 145, 147, 149, 151, 153, 155, 157, 159, 161, 163 or 165;
(ii) a nucleotide sequence encoding the amino acid sequence of SEQ ID NO: 121, 124, 146, 148, 150, 152, 154, 156, 158, 160, 162, 164 or 166;
(iii) a nucleotide sequence having at least 70% identity to the nucleotide sequence of SEQ ID NO: 120, 122, 123, 125, 145, 147, 149, 151, 153, 155, 157, 159, 161, 163 or 165 and encoding a polypeptide having a Pfam:PF00982.15 glycosyltransferase family 20 domain and a Pfam:PF02358.10 trehalose-phosphatase domain;
(iv) a nucleotide sequence encoding an amino acid sequence having at least 80% identity to the amino acid sequence of SEQ ID NO: 121, 124, 146, 148, 150, 152, 154, 156, 158, 160, 162, 164 or 166 and having a Pfam:PF00982.15 glycosyltransferase family 20 domain and a Pfam:PF02358.10 trehalose-phosphatase domain;
(v) a nucleotide sequence encoding an amino acid sequence comprising a Pfam:PF00982.15 glycosyltransferase family 20 domain and a Pfam:PF02358.10 trehalose-phosphatase domain, wherein the Pfam:PF00982.15 glycosyltransferase family 20 domain has at least 50% identity to the amino acid residues 57 to 541 of SEQ ID NO: 121 or the amino acid residues 59 to 546 of SEQ ID NO: 124, and wherein the Pfam:PF02358.10 trehalose-phosphatase domain has at least 55% identity to the amino acid residues 590 to 825 of SEQ ID NO: 121 or the amino acid residues 595 to 830 of SEQ ID NO: 124;
(vi) a nucleotide sequence encoding an amino acid sequence comprising the amino acid sequences of SEQ ID NO: 126, 127, 128, 129, 130, 131, 132, 133, 134, 135, 136 and 137,
and wherein the second nucleic acid molecule comprises:
(i) the nucleotide sequence of SEQ ID NO: 1, 3, 5, 7, 9, 11, 13, 87 or 89;
(ii) a nucleotide sequence encoding the amino acid sequence of SEQ ID NO: 2, 4, 6, 8, 10, 12, 14, 88, or 90;
(iii) a nucleotide sequence having at least 60% identity to the nucleotide sequence of SEQ ID NO: 1, 3, 5, 7, 9, 11, 13, 87 or 89 and encoding a polypeptide having a Pfam:PF00224 pyruvate kinase barrel domain and a Pfam:PF02887 pyruvate kinase alpha/beta domain;
(iv) a nucleotide sequence encoding an amino acid sequence having at least 60% identity to the amino acid sequence of SEQ ID NO: 2, 4, 6, 8, 10, 12, 14, 88 or 90 and having a Pfam:PF00224 pyruvate kinase barrel domain and a Pfam:PF02887 pyruvate kinase alpha/beta domain;
(v) a nucleotide sequence encoding an amino acid sequence comprising a Pfam:PF00224 pyruvate kinase barrel domain and a Pfam:PF02887 pyruvate kinase alpha/beta domain, wherein the Pfam:PF00224 pyruvate kinase barrel domain has at least 80% identity to the amino acid residues 109 to 449 of SEQ ID NO: 2, the amino acid residues 98 to 439 of SEQ ID NO: 10, or the amino acid residues 5 to 350 of SEQ ID NO: 88, and wherein the Pfam:PF02887 pyruvate kinase alpha/beta domain has at least 80% identity to the amino acid residues 462 to 578 of SEQ ID NO: 2, the amino acid residues 452 to 566 of SEQ ID NO: 10, or the amino acid residues 362 to 478 of SEQ ID NO: 88; or
(vi) a nucleotide sequence encoding an amino acid sequence having at least 60% identity to the amino acid sequence of SEQ ID NO: 2, 4, 6, 8, 10, 12, 14, 88 or 90, wherein said amino acid sequence further comprises the amino acid sequences of SEQ ID NO: 258 and 259.

2. The recombinant construct of claim 1, wherein the first promoter and/or the second promoter is a constitutive promoter, a seed-specific or seed-preferential promoter, an endosperm-specific or endosperm-preferential promoter, or an embryo-specific or embryo-preferential promoter.

3. The recombinant construct of claim 2, wherein the constitutive promoter comprises:
(a) the nucleotide sequence of SEQ ID NO: 109 or 110;
(b) a nucleotide sequence having at least 95% identity to the nucleotide sequence of SEQ ID NO: 109 or 110, wherein said nucleotide sequence has constitutive expression activity; or
(c) a fragment of the nucleotide sequence of SEQ ID NO: 109 or 110, wherein the fragment has constitutive expression activity.

4. The recombinant construct of claim 2, wherein the seed-specific or seed-preferential promoter comprises:
(a) the nucleotide sequence of SEQ ID NO: 104, 105, 140, 143 or 144;
(b) a nucleotide sequence having at least 95% identity to the nucleotide sequence of SEQ ID NO: 104, 105, 143 or 144, wherein said nucleotide sequence has seed-specific or seed-preferential expression activity; or
(c) a fragment of the nucleotide sequence of SEQ ID NO: 104, 105, 140, 143 or 144, wherein the fragment has seed-specific or seed-preferential expression activity.

5. The recombinant construct of claim 2, wherein the endosperm-specific or endosperm-preferential promoter comprises:
(a) the nucleotide sequence of SEQ ID NO: 106 or 107;
(b) a nucleotide sequence having at least 95% identity to the nucleotide sequence of SEQ ID NO: 106 or 107, wherein said nucleotide sequence has endosperm-specific or endosperm-preferential expression activity; or
(c) a fragment of the nucleotide sequence of SEQ ID NO: 106 or 107, wherein the fragment has endosperm-specific or endosperm-preferential expression activity.

6. The recombinant construct of claim 2, wherein the embryo-specific or embryo-preferential promoter comprises:
(a) the nucleotide sequence of SEQ ID NO: 108, 141 or 142;
(b) a nucleotide sequence having at least 95% identity to the nucleotide sequence of SEQ ID NO: 108, 141 or 142, wherein said nucleotide sequence has embryo-specific or embryo-preferential expression activity; or
(c) a fragment of the nucleotide sequence of SEQ ID NO: 108, 141 or 142, wherein the fragment has embryo-specific or embryo-preferential expression activity.

7. The recombinant construct of claim 1, wherein the first expression cassette and/or the second expression cassette further comprises an intron.

8. The recombinant construct of claim 7, wherein the intron is a monocot intron.

9. The recombinant construct of claim 8, wherein the monocot intron is a rice intron.

10. The recombinant construct of claim 9, wherein the rice intron is an intron of the rice Metallothionin1 gene (Met1-1) or an intron of the rice MADS3 gene (MADS3).

11. The recombinant construct of claim 10, wherein the intron of the rice Metallothionin1 gene (Met1-1) comprises the nucleotide sequence of SEQ ID NO: 111 (Met1-1) or a nucleotide sequence having at least 90% identity to the nucleotide sequence of SEQ ID NO: 111, or the intron of the rice MADS3 gene (MADS3) comprises the nucleotide sequence of SEQ ID NO: 112 (MADS3) or a nucleotide sequence having at least 90% identity to the nucleotide sequence of SEQ ID NO: 112.

12. The recombinant construct of claim 1, wherein the first expression cassette further comprises a nucleotide sequence that is heterologous to the first nucleic acid molecule and encodes a transit peptide targeting the polypeptide encoded by said first nucleic acid molecule to a plastid.

13. The recombinant construct of claim 1, wherein the second expression cassette further comprises a nucleotide sequence that is heterologous to the second nucleic acid molecule and encodes a transit peptide targeting the polypeptide encoded by said second nucleic acid molecule to a plastid.

14. The recombinant construct of claim 12, wherein the transit peptide is a plastid-targeting peptide from a ferredoxin gene or a malate dehydrogenase gene.

15. The recombinant construct of claim 12, wherein the nucleotide sequence encoding a transit peptide comprises:
(a) the nucleotide sequence of SEQ ID NO: 113 or 138;
(b) a nucleotide sequence encoding the amino acid sequence of SEQ ID NO: 114 or 139; or
(c) a nucleotide sequence encoding a peptide having at least 95% identity to the amino acid sequence of SEQ ID NO: 114 or 139.

16. The recombinant construct of claim 1, wherein the first expression cassette and/or the second expression cassette further comprises a terminator.

17. The recombinant construct of claim 16, wherein said terminator comprises the nucleotide sequence of SEQ ID NO: 115 or 116, or a nucleotide sequence having at least 90% identity to the nucleotide sequence of SEQ ID NO: 115 or 116.

18. The recombinant construct of claim 1, wherein the first nucleic acid molecule comprises:
(a) a nucleotide sequence having at least 95% identity to the nucleotide sequence of SEQ ID NO: 120, 122, 123 or 125; or
(b) a nucleotide sequence encoding an amino acid sequence having at least 95% identity to the amino acid sequence of SEQ ID NO: 121 or 124.

19. The recombinant construct of claim 1, wherein the second nucleic acid molecule comprises:
(a) a nucleotide sequence having at least 95% identity to the nucleotide sequence of SEQ ID NO: 1, 3, 5, 7, 9, 11, 13, 87 or 89; or
(b) a nucleotide sequence encoding an amino acid sequence having at least 95% identity to the amino acid sequence of SEQ ID NO: 2, 4, 6, 8, 10, 12, 14, 88 or 90.

20. The recombinant construct of claim 1, wherein the second nucleic acid molecule comprises:
(a) the nucleotide sequence of SEQ ID NO: 1, 3, 5, 7, 9, 11, 13, 15, 17, 19, 21, 23, 25, 27, 29, 31, 33, 35, 37, 39, 41, 43, 45, 47, 49, 51, 53, 55, 57, 59, 61, 63, 65, 67, 69, 71, 73, 75, 77, 79, 81, 83, 87 or 89; or
(b) a nucleotide sequence encoding the amino acid sequence of SEQ ID NO: 2, 4, 6, 8, 10, 12, 14, 16, 18, 20, 22, 24, 26, 28, 30, 32, 34, 36, 38, 40, 42, 44, 46, 48, 50, 52, 54, 56, 58, 60, 62, 64, 66, 68, 70, 72, 74, 76, 78, 80, 82, 84, 88 or 90.

21. The recombinant construct of claim 1, wherein the first promoter is a constitutive promoter and the second promoter is an endosperm-specific or endosperm-preferential promoter.

22. The recombinant construct of claim 1, wherein the first expression cassette comprises:
(a) the nucleotide sequence of SEQ ID NO: 110;
(b) the nucleotide sequence of SEQ ID NO: 111;
(c) a nucleotide sequence encoding the amino acid sequence of SEQ ID NO: 124; and
(d) the nucleotide sequence of SEQ ID NO: 116,
and wherein the second expression cassette comprises:
(i) the nucleotide sequence of SEQ ID NO: 106;
(ii) the nucleotide sequence of SEQ ID NO: 112;
(iii) a nucleotide sequence encoding the amino acid sequence of SEQ ID NO: 114;
(iv) a nucleotide sequence encoding the amino acid sequence of SEQ ID NO: 2; and
(v) the nucleotide sequence of SEQ ID NO: 115.

23. The recombinant construct of claim 1, wherein expression of the first expression cassette and/or the expression of the second expression cassette in a plant, plant cell, or plant part confers increased content in one or more of protein, oil, or one or more amino acids in said plant, plant cell, or plant part relative to a corresponding wild-type plant, plant cell, or plant part.

24. The recombinant construct of claim 1, wherein expression of the first expression cassette and/or the expression of the second expression cassette in a plant, plant cell, or plant part confers increased content in protein and one or more amino acids in said plant, plant cell, or plant part relative to a corresponding wild-type plant, plant cell, or plant part.

25. The recombinant construct of claim 1, wherein expression of the first expression cassette and/or the expression of the second expression cassette in a plant, plant cell, or plant part confers increased content in protein, oil, and one or more amino acids in said plant, plant cell, or plant part relative to a corresponding wild-type plant, plant cell, or plant part.

26. A vector comprising the recombinant construct of claim 1.

27. A microorganism comprising the recombinant construct of claim 1 or a vector comprising the recombinant construct.

28. A plant, plant cell, or plant part, comprising the recombinant construct of claim 1, wherein the plant, plant cell, or plant part has increased content in one or more of protein, oil, or one or more amino acids relative to a corresponding wild-type plant, plant cell, or plant part.

29. The plant, plant cell, or plant part of claim 28, wherein the plant, plant cell, or plant part has increased content of protein, oil, and one or more amino acids relative to a corresponding wild-type plant, plant cell, or plant part.

30. A plant, plant cell, or plant part, comprising:
(a) a first expression cassette comprising a first promoter that is functional in a plant and is heterologous and operably linked to a first nucleic acid molecule; and
(b) a second expression cassette comprising a second promoter that is functional in a plant and is heterologous and operably linked to a second nucleic acid molecule,
wherein the first nucleic acid molecule comprises:
(i) the nucleotide sequence of SEQ ID NO: 120, 122, 123, 125, 145, 147, 149, 151, 153, 155, 157, 159, 161, 163 or 165;
(ii) a nucleotide sequence encoding the amino acid sequence of SEQ ID NO: 121, 124, 146, 148, 150, 152, 154, 156, 158, 160, 162, 164 or 166;
(iii) a nucleotide sequence having at least 70% identity to the nucleotide sequence of SEQ ID NO: 120, 122, 123, 125, 145, 147, 149, 151, 153, 155, 157, 159, 161, 163 or 165 and encoding a polypeptide having a Pfam:PF00982.15 glycosyltransferase family 20 domain and a Pfam:PF02358.10 trehalose-phosphatase domain;
(iv) a nucleotide sequence encoding an amino acid sequence having at least 80% identity to the amino acid sequence of SEQ ID NO: 121, 124, 146, 148, 150, 152, 154, 156, 158, 160, 162, 164 or 166 and having a Pfam:PF00982.15 glycosyltransferase family 20 domain and a Pfam:PF02358.10 trehalose-phosphatase domain;
(v) a nucleotide sequence encoding an amino acid sequence comprising a Pfam:PF00982.15 glycosyltransferase family 20 domain and a Pfam:PF02358.10 trehalose-phosphatase domain, wherein the Pfam:PF00982.15 glycosyltransferase family 20 domain has at least 50% identity to the amino acid residues 57 to 541 of SEQ ID NO: 121 or the amino acid residues 59 to 546 of SEQ ID NO: 124, and wherein the Pfam:PF02358.10 trehalose-phosphatase domain has at least 55% identity to the amino acid residues 590 to 825 of SEQ ID NO: 121 or the amino acid residues 595 to 830 of SEQ ID NO: 124;
(vi) a nucleotide sequence encoding an amino acid sequence comprising the amino acid sequences of SEQ ID NO: 126, 127, 128, 129, 130, 131, 132, 133, 134, 135, 136 and 137,
and wherein the second nucleic acid molecule comprises:
(i) the nucleotide sequence of SEQ ID NO: 1, 3, 5, 7, 9, 11, 13, 87 or 89;
(ii) a nucleotide sequence encoding the amino acid sequence of SEQ ID NO: 2, 4, 6, 8, 10, 12, 14, 88, or 90;
(iii) a nucleotide sequence having at least 60% identity to the nucleotide sequence of SEQ ID NO: 1, 3, 5, 7, 9, 11, 13, 87 or 89 and encoding a polypeptide having a Pfam:PF00224 pyruvate kinase barrel domain and a Pfam:PF02887 pyruvate kinase alpha/beta domain;
(iv) a nucleotide sequence encoding an amino acid sequence having at least 60% identity to the amino acid sequence of SEQ ID NO: 2, 4, 6, 8, 10, 12, 14, 88 or 90 and having a Pfam:PF00224 pyruvate kinase barrel domain and a Pfam:PF02887 pyruvate kinase alpha/beta domain;
(v) a nucleotide sequence encoding an amino acid sequence comprising a Pfam:PF00224 pyruvate kinase barrel domain and a Pfam:PF02887 pyruvate kinase alpha/beta domain, wherein the Pfam:PF00224 pyruvate kinase barrel domain has at least 80% identity to the amino acid residues 109 to 449 of SEQ ID NO: 2, the amino acid residues 98 to 439 of SEQ ID NO: 10, or the amino acid residues 5 to 350 of SEQ ID NO: 88, and wherein the Pfam:PF02887 pyruvate kinase alpha/beta domain has at least 80% identity to the amino acid residues 462 to 578 of SEQ ID NO: 2, the amino acid residues 452 to 566 of SEQ ID NO: 10, or the amino acid residues 362 to 478 of SEQ ID NO: 88; or
(vi) a nucleotide sequence encoding an amino acid sequence having at least 60% identity to the amino acid sequence of SEQ ID NO: 2, 4, 6, 8, 10, 12, 14, 88 or 90, wherein said amino acid sequence further comprises the amino acid sequences of SEQ ID NO: 258 and 259.

31. The plant, plant cell, or plant part of claim 30, wherein the first promoter and/or the second promoter is a constitutive promoter, a seed-specific or seed-preferential promoter, an endosperm-specific or endosperm-preferential promoter, or an embryo-specific or embryo-preferential promoter.

32. The plant, plant cell, or plant part of claim 31, wherein the constitutive promoter comprises:
(a) the nucleotide sequence of SEQ ID NO: 109 or 110;
(b) a nucleotide sequence having at least 95% identity to the nucleotide sequence of SEQ ID NO: 109 or 110, wherein said nucleotide sequence has constitutive expression activity; or
(c) a fragment of the nucleotide sequence of SEQ ID NO: 109 or 110, wherein the fragment has constitutive expression activity.

33. The plant, plant cell, or plant part of claim 31, wherein the seed-specific or seed-preferential promoter comprises:
(a) the nucleotide sequence of SEQ ID NO: 104, 105, 140, 143 or 144;
(b) a nucleotide sequence having at least 95% identity to the nucleotide sequence of SEQ ID NO: 104, 105, 140, 143 or 144, wherein said nucleotide sequence has seed-specific or seed-preferential expression activity; or
(c) a fragment of the nucleotide sequence of SEQ ID NO: 104, 105, 140, 143 or 144, wherein the fragment has seed-specific or seed-preferential expression activity.

34. The plant, plant cell, or plant part of claim 31, wherein the endosperm-specific or endosperm-preferential promoter comprises:
(a) the nucleotide sequence of SEQ ID NO: 106 or 107;
(b) a nucleotide sequence having at least 95% identity to the nucleotide sequence of SEQ ID NO: 106 or 107, wherein said nucleotide sequence has endosperm-specific or endosperm-preferential expression activity; or
(c) a fragment of the nucleotide sequence of SEQ ID NO: 106 or 107, wherein the fragment has endosperm-specific or endosperm-preferential expression activity.

35. The plant, plant cell, or plant part of claim 31, wherein the embryo-specific or embryo-preferential promoter comprises:
(a) the nucleotide sequence of SEQ ID NO: 108, 141 or 142;
(b) a nucleotide sequence having at least 95% identity to the nucleotide sequence of SEQ ID NO: 108, 141 or 142, wherein said nucleotide sequence has embryo-specific or embryo-preferential expression activity; or
(c) a fragment of the nucleotide sequence of SEQ ID NO: 108, 141 or 142, wherein the fragment has embryo-specific or embryo-preferential expression activity.

36. The plant, plant cell, or plant part of claim 30, wherein the first expression cassette and/or the second expression cassette further comprises an intron.

37. The plant, plant cell, or plant part of claim 36, wherein the intron is a monocot intron.

38. The plant, plant cell, or plant part of claim 37, wherein the monocot intron is a rice intron.

39. The plant, plant cell, or plant part of claim 38, wherein the rice intron is an intron of the rice Metallothionin1 gene (Met1-1) or an intron of the rice MADS3 gene (MADS3).

40. The plant, plant cell, or plant part of claim 39, wherein the intron of the rice Metallothionin1 gene (Met1-1) comprises the nucleotide sequence of SEQ ID NO: 111(Met1-1) or a nucleotide sequence having at least 90% identity to the nucleotide sequence of SEQ ID NO: 111, or the intron of the rice MADS3 gene (MADS3) comprises the nucleotide sequence of SEQ ID NO: 112 (MADS3) or a nucleotide sequence having at least 90% identity to the nucleotide sequence of SEQ ID NO: 112.

41. The plant, plant cell, or plant part of claim 30, wherein the first expression cassette further comprises a nucleotide sequence that is heterologous to the first nucleic acid molecule and encodes a transit peptide targeting the polypeptide encoded by said first nucleic acid molecule to a plastid.

42. The plant, plant cell, or plant part of claim 30, wherein the second expression cassette further comprises a nucleotide sequence that is heterologous to the second nucleic acid molecule and encodes a transit peptide targeting the polypeptide encoded by said second nucleic acid molecule to a plastid.

43. The plant, plant cell, or plant part of claim 41, wherein the transit peptide is a plastid-targeting peptide from a ferredoxin gene or a malate dehydrogenase gene.

44. The plant, plant cell, or plant part of claim 41, wherein the nucleotide sequence encoding a transit peptide comprises:
(a) the nucleotide sequence of SEQ ID NO: 113 or 138;
(b) a nucleotide sequence encoding the amino acid sequence of SEQ ID NO: 114 or 139; or
(c) a nucleotide sequence encoding a peptide having at least 95% identity to the amino acid sequence of SEQ ID NO: 114 or 139.

45. The plant, plant cell, or plant part of claim 30, wherein the first expression cassette and/or the second expression cassette further comprises a terminator.

46. The plant, plant cell, or plant part of claim 45, wherein said terminator comprises the nucleotide sequence of SEQ ID NO: 115 or 116, or a nucleotide sequence having at least 90% identity to the nucleotide sequence of SEQ ID NO: 115 or 116.

47. The plant, plant cell, or plant part of claim 30, wherein the first nucleic acid molecule comprises:
(a) a nucleotide sequence having at least 95% identity to the nucleotide sequence of SEQ ID NO: 120, 122, 123 or 125; or
(b) a nucleotide sequence encoding an amino acid sequence having at least 95% identity to the amino acid sequence of SEQ ID NO: 121 or 124.

48. The plant, plant cell, or plant part of claim 30, wherein the second nucleic acid molecule comprises:
(a) a nucleotide sequence having at least 95% identity to the nucleotide sequence of SEQ ID NO: 1, 3, 5, 7, 9, 11, 13, 87 or 89; or
(b) a nucleotide sequence encoding an amino acid sequence having at least 95% identity to the amino acid sequence of SEQ ID NO: 2, 4, 6, 8, 10, 12, 14, 88 or 90.

49. The plant, plant cell, or plant part of claim 30, wherein the second nucleic acid molecule comprises:
(a) the nucleotide sequence of SEQ ID NO: 1, 3, 5, 7, 9, 11, 13, 15, 17, 19, 21, 23, 25, 27, 29, 31, 33, 35, 37, 39, 41, 43, 45, 47, 49, 51, 53, 55, 57, 59, 61, 63, 65, 67, 69, 71, 73, 75, 77, 79, 81, 83, 87 or 89; or
(b) a nucleotide sequence encoding the amino acid sequence of SEQ ID NO: 2, 4, 6, 8, 10, 12, 14, 16, 18, 20, 22, 24, 26, 28, 30, 32, 34, 36, 38, 40, 42, 44, 46, 48, 50, 52, 54, 56, 58, 60, 62, 64, 66, 68, 70, 72, 74, 76, 78, 80, 82, 84, 88 or 90.

50. The plant, plant cell, or plant part of claim 30, wherein the first promoter is a constitutive promoter and the second promoter is an endosperm-specific or endosperm-preferential promoter.

51. The plant, plant cell, or plant part of claim 30, wherein expression of the first expression cassette and/or the expression of the second expression cassette in a plant, plant cell, or plant part confers increased content in one or more of protein, oil, or one or more amino acids in said plant, plant cell, or plant part relative to a corresponding wild-type plant, plant cell, or plant part.

52. The plant, plant cell, or plant part of claim 30, wherein expression of the first expression cassette and/or the expression of the second expression cassette in a plant, plant cell, or plant part confers increased content in protein and one or more amino acids in said plant, plant cell, or plant part relative to a corresponding wild-type plant, plant cell, or plant part.

53. The plant, plant cell, or plant part of claim 30, wherein expression of the first expression cassette and/or the expression of the second expression cassette in a plant, plant cell, or plant part confers increased content in protein, oil, and one or more amino acids in said plant, plant cell, or plant part relative to a corresponding wild-type plant, plant cell, or plant part.

54. The plant, plant cell, or plant part of claim 28, wherein the plant is a monocotyledonous plant or the plant cell or plant part is from a monocotyledonous plant.

55. The plant, plant cell, or plant part of claim 54, wherein the plant is a maize plant or the plant cell or plant part is from a maize plant.

56. The plant part of claim 28, wherein the plant part is a seed.

57. A food or feed composition comprising the plant, plant cell, or plant part of claim 28.

58. The food or feed composition of claim 57, wherein the food or feed composition is not supplemented with additional protein, oil, or amino acids, or wherein the food or feed composition has reduced supplementation with protein, oil, or amino acids relative to a food or feed composition comprising a corresponding wild-type plant, plant cell, or plant part.

59. The feed composition of claim 57, wherein the feed composition is formulated to meet the dietary requirements of swine, poultry, cattle, or companion animals.

60. A method for producing a transgenic plant, plant cell, or plant part having increased content in one or more of protein, oil, or one or more amino acids relative to a corresponding wild-type plant, plant cell, or plant part, comprising:
(a) transforming a plant, plant cell, or plant part with the recombinant construct of claim 1, or a vector comprising the recombinant construct; and
(b) optionally regenerating from the plant cell or plant part a transgenic plant,
wherein the transgenic plant, plant cell, or plant part has increased content in one or more of protein, oil, or one or more amino acids relative to a corresponding wild-type plant, plant cell, or plant part.

61. The method of claim 60, wherein the first expression cassette and the second expression cassette are on separate vectors.

62. A method for producing a transgenic plant, plant cell, or plant part having increased content in one or more of protein, oil, or one or more amino acids relative to a corresponding wild-type plant, plant cell, or plant part, comprising:
(a) transforming a plant, plant cell, or plant part with the first expression cassette as defined in claim 30 and regenerating from the plant, plant cell or plant part a first transgenic plant;
(b) transforming a plant, plant cell, or plant part with the second expression cassette as defined in claim 30 and regenerating from the plant, plant cell or plant part a second transgenic plant;
(c) crossing the first transgenic plant or progeny thereof with the second transgenic plant or progeny thereof to produce a transgenic plant comprising the first expression cassette and the second expression cassette;
wherein the transgenic plant comprising the first expression cassette and the second expression cassette has increased content in one or more of protein, oil, or one or more amino acids relative to a corresponding wild-type plant.

61. A method for increasing the content of one or more of protein, oil, or one or more amino acids in a plant, plant cell, or plant part relative to a corresponding wild-type plant, plant cell, or plant part, comprising:
(a) obtaining the plant, plant cell, or plant part of claim 28; and
(b) selecting a plant, plant cell, or plant part with increased content in one or more of protein, oil, or one or more amino acids.

62. The method of claim 60, wherein the plant is a monocotyledonous plant or the plant cell or plant part is from a monocotyledonous plant.

63. The method of claim 62, wherein the plant is a maize plant or the plant cell or plant part is from a maize plant.

64. The method of claim 60, wherein the content of one or more amino acids in said plant, plant cell, or plant part is increased relative to a corresponding wild-type plant, plant cell, or plant part.

65. The method of claim 60, wherein the content of protein in said plant, plant cell, or plant part is increased relative to a corresponding wild-type plant, plant cell, or plant part.

66. The method of claim 60, wherein the content of oil in said plant, plant cell, or plant part is increased relative to a corresponding wild-type plant, plant cell, or plant part.

67. The method of claim 60, wherein the content of protein, oil and one or more amino acids in said plant, plant cell, or plant part is increased relative to a corresponding wild-type plant, plant cell, or plant part.

68. The method of claim 60, wherein said plant, plant cell, or plant part has an increased content of one or more amino acids selected from the group consisting of arginine, cysteine, isoleucine, lysine, methionine, threonine, and valine.

69. The method of claim 68, wherein the content of at least two amino acids is increased.

70. A method of producing a food or feed composition comprising:
(a) obtaining the plant, plant cell, or plant part of claim 28 having increased content in one or more of protein, oil, or one or more amino acids relative to a corresponding wild-type plant, plant cell, or plant part;
(b) producing a food or feed composition comprising said plant, plant cell, or plant part.

71. A method for producing a hybrid maize plant or seed comprising:
(a) crossing a first inbred parent maize plant with a second inbred parent maize plant;
(b) harvesting a resultant hybrid maize seed; and
(c) optionally growing a hybrid maize plant from the resultant hybrid maize seed,
wherein said first inbred parent maize plant, and optionally said second inbred parent maize plant, comprises the recombinant construct of claim 1.

72. A method for producing a hybrid maize plant or seed comprising:
(a) crossing a first inbred parent maize plant with a second inbred parent maize plant;
(b) harvesting a resultant hybrid maize seed; and
(c) optionally growing a hybrid maize plant from the resultant hybrid maize seed,
wherein said first inbred parent maize plant comprises the first expression cassette as defined in claim 30, and said second inbred parent maize plant comprises the second expression cassette as defined in claim 30.

72. A hybrid maize plant or seed produced by the method of claim 71.

73. A plant produced by growing the hybrid maize seed of claim 72.

74. A plant breeding program comprising utilizing the plant, plant cell, or plant part of claim 28 as a source of plant breeding material, wherein said plant, plant cell, or plant part has increased content in one or more of protein, oil, or one or more amino acids relative to a corresponding wild-type plant, plant cell, or plant part.

75. A plant, plant cell, or plant part obtained from the plant breeding program of claim 74.

76. A method for developing a maize plant in a maize plant breeding program using plant breeding techniques comprising employing a maize plant, or its parts, as a source of plant breeding material, wherein said maize plant, or its parts, comprises the recombinant construct of claim 1.

77. A method for developing a maize plant in a maize plant breeding program using plant breeding techniques comprising employing a first maize plant, or its parts, and a second maize plant, or its parts, as a source of plant breeding material, wherein said first maize plant, or its parts, comprises the first expression cassette as defined in claim 30, and said second maize plant, or its parts, comprises the second expression cassette as defined in claim 30.

77. The method of claim 76, wherein the plant breeding techniques are selected from the group consisting of recurrent selection, backcrossing, pedigree breeding, restriction length polymorphism enhanced selection, genetic marker enhanced selection, and transformation techniques.

78. A maize plant obtained from the method of claim 76.

79. A method of plant breeding, comprising:
(a) obtaining the hybrid maize plant of claim 72;
(b) crossing said hybrid maize plant with a different maize plant; and
(c) selecting a resultant progeny with increased content in one or more of protein, oil, or one or more amino acids.

80. A method for producing grain with increased content in one or more of protein, oil, or one or more amino acids, comprising:
(a) interplanting a first plant and at least one second plant, wherein the first plant comprises the recombinant construct of claim 1;
(b) growing said first plant and said at least one second plant to obtain preferential inheritance of increased content in one or more of protein, oil, or one or more amino acids in a resultant progeny of said first plant and said at least one second plant; and
(c) harvesting grain from said resultant progeny.

81. A method for producing grain with increased content in one or more of protein, oil, or one or more amino acids, comprising:
(a) interplanting a first plant and at least one second plant, wherein the first plant comprises the first expression cassette as defined in claim 30 and the second plant comprises the second expression cassette as defined in claim 30;
(b) growing said first plant and said at least one second plant to obtain preferential inheritance of increased content in one or more of protein, oil, or one or more amino acids in a resultant progeny of said first plant and said at least one second plant; and
(c) harvesting grain from said resultant progeny.

81. Grain produced by the method of claim 80, wherein the grain has increased content in one or more of protein, oil, or one or more amino acids relative to a corresponding wild-type grain.

82. The grain of claim 81, wherein the one or more amino acids is selected from the group consisting of arginine, cysteine, isoleucine, lysine, methionine, threonine, and valine.

83. The grain of claim 81, wherein the grain is corn.

84. A method for producing a maize plant with increased content in one or more of protein, oil, or one or more amino acids, comprising:
(a) growing a progeny plant obtained from crossing a maize plant comprising the recombinant construct of claim 1 with a second maize plant;
(b) crossing said progeny plant with itself or a different maize plant to produce a resultant seed;
(c) growing said resultant seed to obtain a progeny plant of a subsequent generation; and
(d) crossing said progeny plant of a subsequent generation with itself or a different maize plant; and
(e) repeating steps (b) to (d) for additional 0-5 generations to produce a maize plant with increased content in one or more of protein, oil, or one or more amino acids.

85. A method for producing a maize plant with increased content in one or more of protein, oil, or one or more amino acids, comprising:
(a) growing a progeny plant obtained from crossing a first maize plant comprising the first expression cassette as defined in claim 30 with a second maize plant comprising the second expression cassette as defined in claim 30;
(b) crossing said progeny plant with itself or a different maize plant to produce a resultant seed;
(c) growing said resultant seed to obtain a progeny plant of a subsequent generation; and
(d) crossing said progeny plant of a subsequent generation with itself or a different maize plant; and
(e) repeating steps (b) to (d) for additional 0-5 generations to produce a maize plant with increased content in one or more of protein, oil, or one or more amino acids.

85. The method of claim 84, wherein the maize plant produced is an inbred maize plant.

86. The method of claim 85, further comprising crossing the inbred maize plant with a second, distinct inbred maize plant to produce an F1 hybrid maize plant.
